(19) United States
(12) Patent Application Publication
(10) Pub. No.: US 2025/0361298 A1
(43) Pub. Date: Nov. 27, 2025

(54) LY6G6D BINDING PROTEINS, NUCLEIC ACIDS ENCODING SUCH PROTEINS, AND METHODS FOR THE PREPARATION AND USE THEREOF

(71) Applicant: CARTOGRAPHY BIOSCIENCES, INC., SOUTH SAN FRANCISCO, CA (US)

(72) Inventors: Alexander John MARTINKO, SAN FRANCISCO, CA (US); David Geoffrey KUGLER, SEATTLE, WA (US); Burcu YIGIT, PALO ALTO, CA (US); Robert CHEN, BELMONT, CA (US); Prasuna PALURU, SAN FRANCISCO, CA (US); Janine SCHUURMAN, DIEMEN (NL)

(73) Assignee: CARTOGRAPHY BIOSCIENCES, INC., SOUTH SAN FRANCISCO, CA (US)

(21) Appl. No.: 19/188,935

(22) Filed: Apr. 24, 2025

Related U.S. Application Data
(60) Provisional application No. 63/638,332, filed on Apr. 24, 2024.

(51) Int. Cl. C07K 16/28

(52) U.S. Cl. CPC C07K 16/2803; C07K 2317/33; C07K 2317/52; C07K 2317/92

(57) ABSTRACT

Immunoglobulin complementarity determining regions (“CDRs”), and immunoglobulin binding domains comprising those CDRs, that bind human lymphocyte antigen 6 family member G6D (LY6G6D), and their use for the preparation of LY6G6D-binding proteins finding use as immunotherapeutics.

### CROSS-REFERENCE TO RELATED APPLICATIONS

[0001] The present application claims the benefit of U.S. Provisional Application No. 63/638,332 filed on Apr. 24, 2024, from which priority is claimed and which is hereby incorporated by reference in its entirety.

### SEQUENCE LISTING

[0002] The application contains a Sequence Listing which has been submitted electronically in .XML format and is hereby incorporated by reference in its entirety. Said. XML copy, created on Jul. 3, 2025, is named “CART-002-US1_SeqListing.xml” and is 2,335 kilobytes in size. The sequence listing contained in this .XML file is part of the specification and is hereby incorporated by reference herein in its entirety.

### FIELD OF THE INVENTION

[0003] The present invention relates to the preparation of immunoglobulin complementarity determining regions (“CDRs”), and immunoglobulin binding domains comprising those CDRs, that bind human lymphocyte antigen 6 family member G6D (LY6G6D), and their use for the preparation of LY6G6D-binding proteins in various formats.

### BACKGROUND OF THE INVENTION

[0004] LY6G6D belongs to a cluster of leukocyte antigen-6 (LY6) genes located in the major histocompatibility complex (MHC) class III region on chromosome 6. Members of the LY6 superfamily typically contain 70 to 80 amino acids, including 8 to 10 cysteines. Most LY6 proteins are attached to the cell surface by a glycosylphosphatidylinositol (GPI) anchor that is directly involved in signal transduction. Human LY6G6D (UniProt entry 095868) is expressed as a 133-residue polypeptide that is processed to a mature form comprising 85 amino acids.

[0005] LY6G6D is reportedly expressed in colorectal cancer, and particularly in microsatellite stable (MSS) forms of the disease. MSS CRC represents greater than 90% of patients with metastatic CRC. MSS colorectal tumors are considered to be immunologically “cold” due to a relatively low tumor mutational burden and a tumor microenvironment that lacks substantial T cell infiltration.

[0006] A T cell engager known as LY6G6D-TDB (also known as BLYG8824A) has been shown to have single agent efficacy in murine xenograph CRC models, and that efficacy reportedly improves in combination with checkpoint blockade. Wang et al., Mol. Cancer Ther. 2022 Jun. 1; 21 (6): 974-985 (doi: 10.1158/1535-7163.MCT-21-0599). BLYG8824A is in phase I clinical trials in MSS CRC.

### SUMMARY OF THE INVENTION

[0007] The present invention relates to human LY6G6D-binding proteins and related compositions and methods.

[0008] Mature human LY6G6D (hLY6G6D, residues 20-104 of Swiss-Prot Accession 095868) has the following sequence (SEQ ID NO: 1):

NRMRCYNCGG SPSSSCKEAV TTCGEGRPQP GLEQIKLPGN
PPVTLIHQHP ACVAAHHCNQ VETESVGDVT YPAHRDCYLG DLCNS

[0009] In a first aspect, the present invention provides hLY6G6D binding proteins comprising an immunoglobulin variable region that binds hLY6G6D, wherein the immunoglobulin variable region comprises heavy chain CDRs H1, H2, and H3 and light chain CDRs L1, L2, and L3 as recited for one of the Identifiers in Table 1.

TABLE 1
(SEQ ID NOs: 2-1993, with numbering across rows (so row 1 is SEQ
ID NOs: 2-7, row 2 is SEQ ID NOs: 8-13, etc.):

| Identifier | CDR H1 | CDR H2 | CDR H3 | CDR L1 | CDR L2 | CDR L3 |
|---|---|---|---|---|---|---|
| CB21-469 | SYAMN | GISGNGGRIYYA | DLDV | RSSQSLVHS | KISNRFS | MQATQFPLT |
| | | DSVKG | | DGNTYLN | | |
| CB21-470 | SYGMH | VLWYDGINKNY | VQGDY | RASQGIRN | DTSSLQS | LQHNSYPFT |
| | | ADSVKG | | DLT | | |
| CB21-471 | SYGMH | VIWYDGSNKDY | PGEGDY | RASQGIRN | GASSLQS | LQQNSYPWT |
| | | VDSVKG | | DFG | | |
| CB21-477 | SYGMH | VIWYDGSNKDY | PGEGDY | RASQGIRN | AASSLQS | LQQNSYPWT |
| | | ADSVKG | | DLG | | |
| CB21-500 | SYAMN | GMSGSGGRIYY | DLDV | RSSQNLVHS | KISNRFS | MQATQFPLT |
| | | ADSVKG | | DGNTYLN | | |
| CB21-502 | SYGMH | VLWYDGINKNY | VQGDY | RASQGIRN | DTSSLQS | LQHNIYPFT |
| | | VDSVKG | | DLT | | |
| CB21-512 | SYGMH | VLWYDGINKNY | VQGDY | RASQGIRN | DTSSLQS | LQHNIYPFT |
| | | ADSVKG | | DLT | | |
| CB21-513 | SYAMT | GISGSGGVTDYA | DLGV | RSSQSLVHS | KISNRFS | MQATQFPLT |
| | | DSVKG | | DGNTYLN | | |
| CB21-522 | GYFIH | WINPNSGGTYY | DISLVGD | RSSQSLVYS | KVSNRDS | MQGSHWPLT |
| | | AQEFQG | Y | DGNTYLN | | |
| CB21-498 | SYAMN | GISGNGGRIYYA | DLDV | RSSQSLVHS | KISNRFS | MQATQFPLT |
| | | ESVKG | | DGNTYLN | | |
| CB21-498- | SYAMN | GISGNGGRIYYA | DLDV | RSSQSLVHS | KISNRFS | MQATQFPLT |
| 001 | | ESVKG | | DGNTYLN | | |
| CB21-498- | SYAMN | GISGNGGRIYYA | DLDV | RSSQSLVHS | KISNRFS | MQATQFPLT |
| 002 | | ESVKG | | DGNTYLN | | |
| CB21-498- | SYAMN | GISGNAGRIYYA | DLDV | RSSQSLVHS | KISNRFS | MQATQFPLT |
| 003 | | ESVKG | | DGNTYLN | | |
| CB21-498- | SYAMN | GISGNPGRIYYA | DLDV | RSSQSLVHS | KISNRFS | MQATQFPLT |
| 004 | | ESVKG | | DGNTYLN | | |
| CB21-498- | SYAMN | GISGQGGRIYYA | DLDV | RSSQSLVHS | KISNRFS | MQATQFPLT |
| 005 | | ESVKG | | DGNTYLN | | |
| CB21-498- | SYAMN | GISGSGGRIYYA | DLDV | RSSQSLVHS | KISNRFS | MQATQFPLT |
| 006 | | ESVKG | | DGNTYLN | | |
| CB21-498- | SYAMN | GISGNGGRIYYA | DLDV | RSSQSLVHS | KISNRFS | MQATQFPLT |
| 007 | | ESVKG | | DGNTYLN | | |
| CB21-498- | SYAMN | GISGNGGRIYYA | DLDV | RSSQSLVHS | KISNRFS | MQATQFPLT |
| 008 | | ESVKG | | DGNTYLN | | |
| CB21-498- | SYAMN | GISGNGGSIYYA | DLDV | RSSQSLVHS | KISNRFS | MQATQFPLT |
| 009 | | ESVKG | | DGNTYLN | | |
| CB21-498- | SYAMN | GISGNGGRIYYA | DLDV | RSSQSLVHS | KISNRFS | MQATQFPLT |
| 010 | | ESVKG | | DGNTYLN | | |
| CB21-498- | SYAMN | GISGNGGRIYYA | DLDV | RSSQSLVHS | KISNRFS | MQATQFPLT |
| 011 | | ESVKG | | DANTYLN | | |
| CB21-498- | SYAMN | GISGNGGRIYYA | DLDV | RSSQSLVHS | KISNRFS | MQATQFPLT |
| 012 | | ESVKG | | DINTYLN | | |
| CB21-498- | SYAMN | GISGNGGRIYYA | DLDV | RSSQSLVHS | KISNRFS | MQATQFPLT |
| 013 | | ESVKG | | IGNTYLN | | |
| CB21-498- | SYAMN | GISGNGGRIYYA | DLDV | RSSQSLVHS | KISNRFS | MQATQFPLT |
| 014 | | ESVKG | | EGNTYLN | | |
| CB21-498- | SYAMN | GISGNGGRIYYA | DLDV | RSSQSLVHS | KISNRFS | MQATQFPLT |
| 015 | | ESVKG | | DGNTYLA | | |
| CB21-498- | SYAMN | GISGNGGRIYYA | DLDV | RSSQSLVHS | KISNRFS | MQATQFPLT |
| 016 | | ESVKG | | DGNTYLN | | |
| CB21-498- | SYAMN | GISGNGGRIYYA | DLDV | RSSQSLVHS | KISNRFS | MQATQFPLT |
| 017 | | ESVKG | | DGNTYLN | | |
| CB21-498- | SYAMN | GISGNGGRIYYA | DLDV | RSSQSLVHS | KISNRFS | MQATQFPLT |
| 018 | | ESVKG | | DGNTYLN | | |
| CB21-498- | SYAMN | GISGNGGRIYYA | DLDV | RSSQSLVHS | KASNRFS | MQATQFPLT |
| 019 | | ESVKG | | DGNTYLN | | |
| CB21-498- | SYAMN | GISGNGGRIYYA | DLDV | RSSQSLVHS | KISNRFS | MQATQFPLT |
| 020 | | ESVKG | | DGNTYLN | | |
| CB21-498- | SYAMN | GISGNGGRIYYA | DLDV | RSSQSLVHS | KISNRFS | MQATQFPLT |
| 021 | | ESVKG | | DGNTYLN | | |
| CB21-498- | SYAMN | GISGNGGRIYYA | DLDV | RSSQSLVHS | KISNRFS | MQATQFPLT |
| 022 | | ESVKG | | DGNTYLN | | |
| CB21-498- | SYAMN | GISGNGGRIYYA | DLDV | RSSQSLVHS | KISNRFS | MQATQFPLT |
| 023 | | ESVKG | | DGNTYLN | | |
| CB21-498- | SYAMN | GISGNGGRIYYA | DLDV | RSSQSLVHS | KISNRFS | MQATQFPLT |
| 024 | | ESVKG | | DGNTYLN | | |
| CB21-498- | SYAMN | GISGNGGRIYYA | DLDV | RSSQSLVHS | KISNRFS | MQATQFPLT |
| 025 | | ESVKG | | DGNTYLN | | |
| CB21-498- | SYAMN | GISGNGGRIYYA | DLDV | RSSQSLVHS | KISNRFS | MQATQFPLT |
| 026 | | ESVKG | | DGNTYLN | | |
| CB21-498- | SYAMN | GISGNGGRIYYA | DLDV | RSSQSLVHS | KISNRFS | MQATQFPLT |
| 027 | | ESVKG | | DGNTYLN | | |
| CB21-498- | SYAMN | GISGNAGRIYYA | DLDV | RSSQSLVHS | KISNRFS | MQATQFPLT |
| 028 | | ESVKG | | DGNTYLN | | |
| CB21-498- | SYAMN | GISGNGGRIYYA | DLDV | RSSQSLVHS | RISNRFS | MQATQFPLT |
| 029 | | ESVKG | | DGNTYLN | | |
| CB21-498- | SYAMN | GISGNGGRIYYA | DLDV | RSSQSLVHS | KASNRFS | MQATQFPLT |
| 030 | | ESVKG | | DGNTYLN | | |
| CB21-498- | SYAMN | GISGNGGRIYYA | DLDV | RSSQSLVHS | KNSNRFS | MQATQFPLT |
| 031 | | ESVKG | | DGNTYLN | | |
| CB21-498- | SYAMN | GISGNGGRIYYA | DLDV | RSSQSLVHS | KTSNRFS | MQATQFPLT |
| 032 | | ESVKG | | DGNTYLN | | |
| CB21-498- | SYAMN | GISGNGGRIYYA | DLDV | RSSQSLVHS | KVSNRFS | MQATQFPLT |
| 033 | | ESVKG | | DGNTYLN | | |
| CB21-498- | SYAMN | GISGNGGRIYYA | DLDV | RSSQSLVHS | KISNLFS | MQATQFPLT |
| 034 | | ESVKG | | DGNTYLN | | |
| CB21-498- | SYAMN | GISGNGGRIYYA | DLDV | RSSQSLVHS | KISNDFS | MQATQFPLT |
| 035 | | ESVKG | | DGNTYLN | | |
| CB21-498- | SYAMN | GISGNGGRIYYA | DLDV | RSSQSLVHS | KISNEFS | MQATQFPLT |
| 036 | | ESVKG | | DGNTYLN | | |
| CB21-498- | SYAMN | GISGNGGRIYYA | DLDV | RSSQSLVHS | KISNSFS | MQATQFPLT |
| 037 | | ESVKG | | DGNTYLN | | |
| CB21-498- | SYAMN | GISGNGGRIYYA | DLDV | RSSQSLVHS | KISNPFS | MQATQFPLT |
| 038 | | ESVKG | | DGNTYLN | | |
| CB21-498- | SYAMN | GISGNGGRIYYA | DLDV | RSSQSLVHS | KISNRPS | MQATQFPLT |
| 039 | | ESVKG | | DGNTYLN | | |
| CB21-498- | SYAMN | GISGNGGRIYYA | DLDV | RSSQSLVHS | KISNRAS | MQATQFPLT |
| 040 | | ESVKG | | DGNTYLN | | |
| CB21-498- | SYAMN | GISGNGGRIYYA | DLDV | RSSQSLVHS | KISNRGS | MQATQFPLT |
| 041 | | ESVKG | | DGNTYLN | | |
| CB21-498- | SYAMN | GISGNGGRIYYA | DLDV | RSSQSLVHS | KISNRSS | MQATQFPLT |
| 042 | | ESVKG | | DGNTYLN | | |
| CB21-498- | SYAMN | GISGNGGRIYYA | DLDV | RSSQSLVHS | KISNRNS | MQATQFPLT |
| 043 | | ESVKG | | DGNTYLN | | |
| CB21-498- | SYAMN | GISGNGGRIYYA | DLDV | RSSQSLVHS | KISNRQS | MQATQFPLT |
| 044 | | ESVKG | | DGNTYLN | | |
| CB21-498- | SYAMN | GISGNGGRIYYA | DLDV | RSSQSLVHS | KISNRES | MQATQFPLT |
| 045 | | ESVKG | | DGNTYLN | | |
| CB21-498- | SYAMN | GISGNGGRIYYA | DLDV | RSSQSLVHS | KISNRDS | MQATQFPLT |
| 046 | | ESVKG | | DGNTYLN | | |
| CB21-498- | SYAMN | GISGNGGRIYYA | DLDV | RSSQSLVHS | KISNRFP | MQATQFPLT |
| 047 | | ESVKG | | DGNTYLN | | |
| CB21-498- | SYAMN | GISGNGGRIYYA | DLDV | RSSQSLVHS | KISNRFS | MQATQFPLT |
| 048 | | ESVKG | | DGNTYLN | | |
| CB21-498- | SYAMN | GISGNGGRIYYA | DLDV | RSSQSLVHS | KISNRFS | NQATQFPLT |
| 049 | | ESVKG | | DGNTYLN | | |
| CB21-498- | SYAMN | GISGNGGRIYYA | DLDV | RSSQSLVHS | KISNRFS | WQATQFPLT |
| 050 | | ESVKG | | DGNTYLN | | |
| CB21-498- | SYAMN | GISGNGGRIYYA | DLDV | RSSQSLVHS | KISNRFS | MQGTQFPLT |
| 051 | | ESVKG | | DGNTYLN | | |
| CB21-498- | SYAMN | GISGNGGRIYYA | DLDV | RSSQSLVHS | KISNRFS | MQNTQFPLT |
| 052 | | ESVKG | | DGNTYLN | | |
| CB21-498- | SYAMN | GISGNGGRIYYA | DLDV | RSSQSLVHS | KISNRFS | MQATQSPLT |
| 053 | | ESVKG | | DGNTYLN | | |
| CB21-498- | SYAMN | GISGNGGRIYYA | DLDV | RSSQSLVHS | KISNRFS | MQATQTPLT |
| 054 | | ESVKG | | DGNTYLN | | |
| CB21-498- | SYAMN | GISGNGGRIYYA | DLDV | RSSQSLVHS | KISNRFS | MQATQYPLT |
| 055 | | ESVKG | | DGNTYLN | | |
| CB21-498- | SYAMN | GISGNGGRIYYA | DLDV | RSSQSLVHS | KISNRFS | MQATQNPLT |
| 056 | | ESVKG | | DGNTYLN | | |
| CB21-498- | SYAMN | GISGNGGRIYYA | DLDV | RSSQSLVHS | KISNRFS | MQATQLPLT |
| 057 | | ESVKG | | DGNTYLN | | |
| CB21-498- | SYAMN | GISGNGGRIYYA | DLDV | RSSQSLVHS | KISNRFS | MQATQAPLT |
| 058 | | ESVKG | | DGNTYLN | | |
| CB21-498- | SYAMN | GISGNGGRIYYA | DLDV | RSSQSLVHS | KISNRFS | MQATQFNLT |
| 059 | | ESVKG | | DGNTYLN | | |
| CB21-498- | SYAMN | GISGNGGRIYYA | DLDV | RSSQSLVHS | KISNRFS | MQATQFQLT |
| 060 | | ESVKG | | DGNTYLN | | |
| CB21-498- | SYAMN | GISGNGGRIYYA | DLDV | RSSQSLVHS | KISNRFS | MQATQFDLT |
| 061 | | ESVKG | | DGNTYLN | | |
| CB21-498- | SYAMN | GISGNGGRIYYA | DLDV | RSSQSLVHS | KISNRFS | MQATQFSLT |
| 062 | | ESVKG | | DGNTYLN | | |
| CB21-498- | SYAMN | GISGNGGRIYYA | DLDV | RSSQSLVHS | KISNRFS | MQATQFPST |
| 063 | | ESVKG | | DGNTYLN | | |
| CB21-498- | SYAMN | GISGNGGRIYYA | DLDV | RSSQSLVHS | KISNRFS | MQATQFPGT |
| 064 | | ESVKG | | DGNTYLN | | |
| CB21-498- | SYAMN | GISGNGGRIYYA | DLDV | RSSQSLVHS | KISNRFS | MQATQFPYT |
| 065 | | ESVKG | | DGNTYLN | | |
| CB21-498- | SYAMN | GISGNGGRIYYA | DLDV | RSSQSLVHS | KISNRFS | MQATQFPWT |
| 066 | | ESVKG | | DGNTYLN | | |
| CB21-498- | SYAMN | GISGNGGRIYYA | DLDV | RSSQSLVHS | KISNRFS | MQATQFSLP |
| 067 | | ESVKG | | DGNTYLN | | |
| CB21-498- | SYAMN | GISGSGGRIYYA | DLDV | RSSQSLVHS | KISNRFS | MQATQFPLT |
| 068 | | ESVKG | | DGNTYLN | | |
| CB21-498- | SYAMN | GISGNGGRIYYA | DLDV | RSSQSLVHS | KISNRFS | MQATQFPLT |
| 069 | | ESVKG | | DGNTYLN | | |
| CB21-498- | SYAMN | GISGSGGRIYYA | DLDV | RSSQSLVHS | KISNRFS | MQATQFPLT |
| 070 | | ESVKG | | DGNTYLN | | |
| CB21-498- | SYAMN | GISGNGGRIYYA | DLDV | RSSQSLVHS | KISNRFS | MQATQFPLT |
| 071 | | ESVKG | | DANTYLN | | |
| CB21-498- | SYAMN | GISGSGGRIYYA | DLDV | RSSQSLVHS | KISNRFS | MQATQFPLT |
| 072 | | ESVKG | | DANTYLN | | |
| CB21-498- | SYAMN | GISGNGGRIYYA | DLDV | RSSQSLVHS | KISNRFS | MQATQFPLT |
| 073 | | ESVKG | | DANTYLN | | |
| CB21-498- | SYAMN | GISGSGGRIYYA | DLDV | RSSQSLVHS | KISNRFS | MQATQFPLT |
| 074 | | ESVKG | | DANTYLN | | |
| CB21-498- | SYAMN | GISGNGGRIYYA | DLDV | RSSQSLVHS | KISNRFS | MQATQFPLT |
| 075 | | ESVKG | | DANTYLN | | |
| CB21-498- | SYAMN | GISGSGGRIYYA | DLDV | RSSQSLVHS | KISNRFS | MQATQFPLT |
| 076 | | ESVKG | | DANTYLN | | |
| CB21-498- | SYAMN | GISGNGGRIYYA | DLDV | RSSQSLVHS | KISNRFS | MQATQFPLT |
| 077 | | ESVKG | | DANTYLN | | |
| CB21-498- | SYAMN | GISGNGGRIYYA | DLDV | RSSQSLVHS | KISNRFS | MQATQFPLT |
| 078 | | ESVKG | | DANTYLN | | |
| CB21-498- | SYAMN | GISGSGGRIYYA | DLDV | RSSQSLVHS | KISNRFS | MQATQFPLT |
| 079 | | ESVKG | | DANTYLN | | |
| CB21-498- | SYAMN | GISGNGGRIYYA | DLDV | RSSQSLVHS | KISNRFS | MQATQFPLT |
| 080 | | ESVKG | | DANTYLN | | |
| CB21-498- | SYAMN | GISGSGGRIYYA | DLDV | RSSQSLVHS | KISNRFS | MQATQFPLT |
| 081 | | ESVKG | | DANTYLN | | |
| CB21-498- | SYAMN | GISGNGGRIYYA | DLDV | RSSQSLVHS | KISNRFS | MQATQFPLT |
| 082 | | ESVKG | | DANTYLN | | |
| CB21-498- | SYAMN | GISGSGGRIYYA | DLDV | RSSQSLVHS | KISNRFS | MQATQFPLT |
| 083 | | ESVKG | | DANTYLN | | |
| CB21-498- | SYAMN | GISGNGGRIYYA | DLDV | RSSQSLVHS | KISNRFS | MQATQFPLT |
| 084 | | ESVKG | | DANTYLN | | |
| CB21-498- | SYAMN | GISGNGGRIYYA | DLDV | RSSQSLVHS | KISNRFS | MQATQFPLT |
| 085 | | ESVKG | | DANTYLN | | |
| CB21-498- | SYAMN | GISGSGGRIYYA | DLDV | RSSQSLVHS | KISNRFS | MQATQFPLT |
| 086 | | ESVKG | | DANTYLN | | |
| CB21-498- | SYAMN | GISGNGGRIYYA | DLDV | RSSQSLVHS | KISNRFS | MQATQFPLT |
| 087 | | ESVKG | | DANTYLN | | |
| CB21-498- | SYAMN | GISGSGGRIYYA | DLDV | RSSQSLVHS | KISNRFS | MQATQFPLT |
| 088 | | ESVKG | | DANTYLN | | |
| CB21-498- | SYAMN | GISGNGGRIYYA | DLDV | RSSQSLVHS | KISNRFS | MQATQFPLT |
| 089 | | ESVKG | | DANTYLN | | |
| CB21-498- | SYAMN | GISGSGGRIYYA | DLDV | RSSQSLVHS | KISNRFS | MQATQFPLT |
| 090 | | ESVKG | | DANTYLN | | |
| CB21-498- | SYAMS | GISGSGGRIYYA | DLDV | RSSQSLVHS | KISNRFS | MQATQFPLT |
| 091 | | ESVKG | | DGNTYLN | | |
| CB21-498- | SYAMH | GISGSGGRIYYA | DLDV | RSSQSLVHS | KISNRFS | MQATQFPLT |
| 092 | | ESVKG | | DGNTYLN | | |
| CB21-498- | SYAMT | GISGSGGRIYYA | DLDV | RSSQSLVHS | KISNRFS | MQATQFPLT |
| 093 | | ESVKG | | DGNTYLN | | |
| CB21-498- | SYAMN | GISGSGGRIYYA | DLDV | RSSQSLVHS | KISNRFS | MQATQFPLT |
| 094 | | ESVKG | | DGNTYLN | | |
| CB21-498- | SYAMN | GISGSGGRIYYA | DLDV | RSSQSLVHS | KISNRFS | MQATQFPLT |
| 095 | | ESVKG | | DGNTYLN | | |
| CB21-498- | SYAMN | GISGSGGRIYYA | DLDV | RSSQSLVHS | KISNRFS | MQATQFPLT |
| 096 | | ESVKG | | DGNTYLN | | |
| CB21-498- | SYAMN | GISGSGGRIYKA | DLDV | RSSQSLVHS | KISNRFS | MQATQFPLT |
| 097 | | ESVKG | | DGNTYLN | | |
| CB21-498- | SYAMN | GISGSGGRIYYA | DLDV | RSSQSLVHS | KISNRFS | MQATQFPLT |
| 098 | | ESVKG | | DGNTYLN | | |
| CB21-498- | SYAMN | GISGSGGRIYYA | DLDV | RSSQSLVHS | KISNRFS | MQATQFPLT |
| 099 | | ESVKG | | DGNTYLN | | |
| CB21-498- | SYAMN | GISGSGGRIYYA | DLDV | RSSQSLVHS | KISNRFS | MQATQFPLT |
| 100 | | ESVKG | | DGNTYLN | | |
| CB21-498- | SYAMN | GISGSGGRIYYA | DLDV | RSSQSLVHS | KISNRFS | MQATQFPLT |
| 101 | | ESVKG | | DGNTYLN | | |
| CB21-498- | SYAMN | GISGSGGRIYYA | DLDV | RSSQSLVHS | KISNRFS | MQATQFPLT |
| 102 | | ESVKG | | DGNTYLN | | |
| CB21-498- | SYAMN | GISGSGGRIYYA | DLDV | RSSQSLVHS | KISNRFS | MQATQFPLT |
| 103 | | ESVKG | | DGNTYLN | | |
| CB21-498- | SYAMN | GISGSGGRIYYA | DLDV | RSSQSLVHS | KISNRFS | MQATQFPLT |
| 104 | | ESVKG | | DGNTYLN | | |
| CB21-498- | SYAMN | GISGSGGRIYYA | DLDV | RSSQSLVHS | KISNRFS | MQATQFPLT |
| 105 | | ESVKG | | DGNTYLN | | |
| CB21-498- | DYAMN | GISGSGGRIYYA | DLDV | RSSQSLVHS | KISNRFS | MQATQFPLT |
| 106 | | ESVKG | | DGNTYLN | | |
| CB21-498- | SYAMN | GISGSGGAIYYA | DLDV | RSSQSLVHS | KISNRFS | MQATQFPLT |
| 107 | | ESVKG | | DGNTYLN | | |
| CB21-498- | SYAMN | GISGSGGRAYYA | DLDV | RSSQSLVHS | KISNRFS | MQATQFPLT |
| 108 | | ESVKG | | DGNTYLN | | |
| CB21-498- | SYAMN | GISGSGGSTYYA | DLDV | RSSQSLVHS | KISNRFS | MQATQFPLT |
| 109 | | ESVKG | | DGNTYLN | | |
| CB21-498- | SYAMN | GISGSGGRIFYA | DLDV | RSSQSLVHS | KISNRFS | MQATQFPLT |
| 110 | | ESVKG | | DGNTYLN | | |
| CB21-498- | SYAMN | GISGSGGRIHYA | DLDV | RSSQSLVHS | KISNRFS | MQATQFPLT |
| 111 | | ESVKG | | DGNTYLN | | |
| CB21-498- | SYAMN | GISGSGGRINYA | DLDV | RSSQSLVHS | KISNRFS | MQATQFPLT |
| 112 | | ESVKG | | DGNTYLN | | |
| CB21-498- | SYAMN | GISGSGGRIK YA | DLDV | RSSQSLVHS | KISNRFS | MQATQFPLT |
| 113 | | ESVKG | | DGNTYLN | | |
| CB21-498- | SYAMN | GISGSGGRIDYA | DLDV | RSSQSLVHS | KISNRFS | MQATQFPLT |
| 114 | | ESVKG | | DGNTYLN | | |
| CB21-498- | SYAMN | GISGSGGRIAYA | DLDV | RSSQSLVHS | KISNRFS | MQATQFPLT |
| 115 | | ESVKG | | DGNTYLN | | |
| CB21-498- | SYAMN | GISGSGGRIYFA | DLDV | RSSQSLVHS | KISNRFS | MQATQFPLT |
| 116 | | ESVKG | | DGNTYLN | | |
| CB21-498- | SYAMN | GISGSGGRIYHA | DLDV | RSSQSLVHS | KISNRFS | MQATQFPLT |
| 117 | | ESVKG | | DGNTYLN | | |
| CB21-498- | SYAMN | GISGSGGRIYPA | DLDV | RSSQSLVHS | KISNRFS | MQATQFPLT |
| 118 | | ESVKG | | DGNTYLN | | |
| CB21-498- | SYAMN | GISGSGGRIYAA | DLDV | RSSQSLVHS | KISNRFS | MQATQFPLT |
| 119 | | ESVKG | | DGNTYLN | | |
| CB21-498- | SYAMN | GISGSGGRIYYA | DLDV | RSSQSLVHS | KISNRFS | MQATQFPLT |
| 120 | | ESVKG | | DGNTYLN | | |
| CB21-498- | SYAMN | GISGSGGRIYYA | DLDV | RSSQSLVHS | KISNRFS | MQATQFPLT |
| 121 | | ESVKG | | DGNTYLN | | |
| CB21-498- | SYAMN | GISGSGGRIYSA | DLDV | RSSQSLVHS | KISNRFS | MQATQFPLT |
| 122 | | ESVKG | | DGNTYLN | | |
| CB21-498- | SYAMN | GISGNGGRIYYA | DLDV | RSSQSLVHS | KISNRFD | MQATQFPLT |
| 123 | | ESVKG | | DGNTYLN | | |
| CB21-498- | SYAMN | GISGNGGRIYYA | DLDV | RSSQSLVHS | KISNRFE | MQATQFPLT |
| 124 | | ESVKG | | DGNTYLN | | |
| CB21-498- | SYAMN | GISGNGGRIYYA | DLDV | RSSQSLVHS | KISNRFQ | MQATQFPLT |
| 125 | | ESVKG | | DGNTYLN | | |
| CB21-498- | SYAMN | GISGNGGRIYYA | DLDV | RSSQSLVHS | KISNRFS | MQATQFPLT |
| 126 | | ESVKG | | DGNTYLN | | |
| CB21-498- | SYAMN | GISGNGGRIYYA | DLDV | RSSQSLVHS | KISNRFS | MQATQFPLT |
| 127 | | ESVKG | | DGNTYLN | | |
| CB21-498- | SYAMN | GISGNGGRIYYA | DLDV | RSSQSLVHS | KISNRFS | MQATQFPLT |
| 128 | | ESVKG | | DGNTYLN | | |
| CB21-498- | SYAMN | GISGNGGRIYYA | DLDV | RSSQSLVHS | KISNRFS | MQATQFPLT |
| 129 | | ESVKG | | DGNTYLN | | |
| CB21-498- | SYAMN | GISGNGGRIYYA | DLDV | RSSQSLVHS | KISNRFS | MQATQFPLT |
| 130 | | ESVKG | | DGNTYLN | | |
| CB21-498- | SYAMN | GISGNGGRIYYA | DLDV | RSSQSLVHS | KISNRFS | MQATQFPLT |
| 131 | | ESVKG | | DGNTYLN | | |
| CB21-498- | SYAMN | GISGNGGRIYYA | DLDV | RSSQSLVHS | KIDNRFS | MQATQFPLT |
| 132 | | ESVKG | | DGNTYLN | | |
| CB21-498- | SYAMN | GISGNGGRIYYA | DLDV | RSSQSLVHS | KIDNRFS | MQATQFPLT |
| 133 | | ESVKG | | DGNTYLN | | |
| CB21-498- | SYAMN | GISGSGGRAYYA | DLDV | RSSQSLVHS | KISNRFS | MQATQFPLT |
| 134 | | ESVKG | | DANTYLN | | |
| CB21-498- | SYAMN | GISGSGGRIYYA | DLDV | RSSQSLVHS | KISNRFS | MQATQFPLT |
| 135 | | ESVKG | | DANTYLN | | |
| CB21-498- | DYAMN | GISGSGGRIYYA | DLDV | RSSQSLVHS | KISNRFS | MQATQFPLT |
| 136 | | ESVKG | | DANTYLN | | |
| CB21-498- | SYAMN | GISGSGGRAYYA | DLDV | RSSQSLVHS | KISNRFS | MQATQFPLT |
| 137 | | ESVKG | | DANTYLN | | |
| CB21-498- | DYAMN | GISGSGGRAYYA | DLDV | RSSQSLVHS | KISNRFS | MQATQFPLT |
| 138 | | ESVKG | | DANTYLN | | |
| CB21-498- | DYAMN | GISGSGGRIYYA | DLDV | RSSQSLVHS | KISNRFS | MQATQFPLT |
| 139 | | ESVKG | | DANTYLN | | |
| CB21-498- | DYAMN | GISGSGGRAYYA | DLDV | RSSQSLVHS | KISNRFS | MQATQFPLT |
| 140 | | ESVKG | | DANTYLN | | |
| CB21-498 | SYAMN | GISGSGGRIYYA | DLDV | RSSQSLVHS | KISNRFS | MQATQFPLT |
| 141 | | ESVKG | | DANTYLN | | |
| CB21-498- | SYAMN | GISGSGGRIYYA | DLDV | RSSQSLVHS | KISNRFS | MQATQFPLT |
| 142 | | ESVKG | | DANTYLN | | |
| CB21-498- | SYAMN | GISGSGGRIYYA | DLDV | RSSQSLVHS | KISNRFS | MQATQFPLT |
| 143 | | ESVKG | | DGNTYLN | | |
| CB21-499 | SYGMH | VIWYDGSNKDY | PGEGDY | RASQGVRN | GASSLQS | LQQNSYPWT |
| | | ADSVKG | | DFG | | |
| CB21-499- | SYGMH | VIWYDASNKDY | PGEGDY | RASQGVRN | GASSLQS | LQQNSYPWT |
| 001 | | ADSVKG | | DFG | | |
| CB21-499- | SYGMH | VIWYDPSNKDY | PGEGDY | RASQGVRN | GASSLQS | LQQNSYPWT |
| 002 | | ADSVKG | | DFG | | |
| CB21-499- | SYGMH | VIWYEGSNKDY | PGEGDY | RASQGVRN | GASSLQS | LQQNSYPWT |
| 003 | | ADSVKG | | DFG | | |
| CB21-499- | SYGMH | VIWYSGSNKDY | PGEGDY | RASQGVRN | GASSLQS | LQQNSYPWT |
| 004 | | ADSVKG | | DFG | | |
| CB21-499- | SYGMH | VIWYDGSNKDY | PGEGDY | RASQGVRN | GASSLQS | LQQNSYPWT |
| 005 | | APSVKG | | DFG | | |
| CB21-499- | SYGMH | VIWYDGSNKDY | PGEGDY | RASQGVRN | GASSLQS | LQQNSYPWT |
| 006 | | AQSVKG | | DFG | | |
| CB21-499- | SYGMH | VIWYDGSNKDY | PGEGDY | RASQGVRN | GASSLQS | LQQNSYPWT |
| 007 | | AESVKG | | DFG | | |
| CB21-499- | SYGMH | VIWYDGSNKDY | PGEGDY | RASQGVRN | GASSLQS | LQQNSYPWT |
| 008 | | ADAVKG | | DFG | | |
| CB21-499- | SYGMH | VIWYDGSNKDY | DGEGDY | RASQGVRN | GASSLQS | LQQNSYPWT |
| 009 | | ADSVKG | | DFG | | |
| CB21-499- | SYGMH | VIWYDGSNKDY | PGEGDY | RASQGVRN | GASSLQS | LQQNSYPWT |
| 010 | | ADSVKG | | DFG | | |
| CB21-499- | SYGMH | VIWYDGSNKYY | PGEGDY | RASQGVRN | GASSLQS | LQQNSYPWT |
| 011 | | ADSVKG | | DFG | | |
| CB21-499- | SYGMH | VIWYDGSSKDY | PGEGDY | RASQGVRN | GASSLQS | LQQNSYPWT |
| 012 | | ADSVKG | | DFG | | |
| CB21-499- | SYGMH | VIWYDGSNKDY | PGYGDY | RASQGVRN | GASSLQS | LQQNSYPWT |
| 013 | | ADSVKG | | DFG | | |
| CB21-499- | SYGMH | VIWYDGSNKDY | PGEGDY | RASQGVRN | GASSLQS | LQQNSYPWT |
| 014 | | ADSVKG | | DFG | | |
| CB21-499- | SYGMH | VIWYDGSNKDY | PGEGDY | RASQGVRN | GASSLQS | LQQNSYPWT |
| 015 | | ADSVKG | | DFG | | |
| CB21-499- | SYGMH | VIWYDGSNKDY | PGEFDY | RASQGVRN | GASSLQS | LQQNSYPWT |
| 016 | | ADSVKG | | DFG | | |
| CB21-499- | SYGMH | VIWYDGSNKDY | PGEGDY | RASQGVRN | GASSLQS | LQQNSYPWT |
| 017 | | ADSVKG | | DFG | | |
| CB21-499- | SYGMH | VIWYDGSNKDY | PGEGDY | RASQGVRN | GASSLQS | LQQNSYPWT |
| 018 | | ADSVKG | | DLG | | |
| CB21-499- | SYGMH | VIWYDGSNKDY | PGEGDY | RASQGVRN | GASSLQS | QQQNSYPWT |
| 019 | | ADSVKG | | DFG | | |
| CB21-499- | SYGMH | VIWYDGSNKDY | PGEGDY | RASQGVSN | GASSLQS | LQQNSYPWT |
| 020 | | ADSVKG | | DFG | | |
| CB21-499- | SYGMH | VIWYDGSNKDY | PGEGDY | RASQGVRN | GASSLQS | LQQNSYPWT |
| 021 | | ADSVKG | | DFG | | |
| CB21-499- | SYGMH | VIWYDGSNKDY | PGEGDY | RASQGVRN | GASSLQS | LQYNSYPWT |
| 022 | | ADSVKG | | DFG | | |
| CB21-499- | SYGMH | VIWYDGSNKDY | PGEGDY | RASQGVRN | GASSLQS | LQQNSYPFT |
| 023 | | ADSVKG | | DFG | | |
| CB21-499- | SYGMH | VIWYDASNKDY | PGEGDY | RASQGVRN | GASSLQS | LQQNSYPWT |
| 024 | | AESVKG | | DFG | | |
| CB21-499- | SYGMH | VIWYDASNKDY | PGEGDY | RASQGVRN | GASSLQS | LQQNSYPWT |
| 025 | | APSVKG | | DFG | | |
| CB21-499- | SYGMH | VIWYDGSNKDY | PGEGDY | RASQGVRN | GASSLQS | LQQNSYPWT |
| 026 | | ADSVKG | | DFG | | |
| CB21-499- | SYGMH | VIWYDGSNKDY | PGEGDY | RASQGVRN | GASSLQS | LQQNSYPWT |
| 027 | | ADSVKG | | DFG | | |
| CB21-499- | SYGMH | VIWYDGSNKDY | PGEGDY | RASQGVRN | GASSLQS | LQQNSYPWT |
| 028 | | ADSVKG | | DFG | | |
| CB21-499- | SYGMH | VIWYDGSNKDY | PGEGDY | RASQGVRN | GASSLQS | LQQNSYPWT |
| 029 | | ADSVKG | | DFG | | |
| CB21-499- | SYGMH | VIWYDGSNKDY | PGEGDY | RASQGVRN | GASSLQS | LQQNSYPWT |
| 030 | | ADSVKG | | DFG | | |
| CB21-499- | SYGMH | VIWYDGSNKDY | PGEGDY | RASQGVRN | GASSLQS | LQQNSYPWT |
| 031 | | ADSVKG | | DFG | | |
| CB21-499- | SYGMH | VIWYDGSNKDY | PGEGDY | RASQGVRN | GASSLQS | LQQNSYPWT |
| 032 | | ADSVKG | | DFG | | |
| CB21-499- | SYGMH | VIWYDGSNKDY | PGEGDY | RASQGVRN | GASSLQS | LQQNSYPWT |
| 033 | | ADSVKG | | DFG | | |
| CB21-499- | SYGMH | VIWYDGSNKDY | PGEGDY | RASQGVRN | GASSLQS | LQQNSYPWT |
| 034 | | ADSVKG | | DFG | | |
| CB21-499- | SYAMH | VIWYDGSNKDY | PGEGDY | RASQGVRN | GASSLQS | LQQNSYPWT |
| 035 | | ADSVKG | | DFG | | |
| CB21-499- | SYTMH | VIWYDGSNKDY | PGEGDY | RASQGVRN | GASSLQS | LQQNSYPWT |
| 036 | | ADSVKG | | DFG | | |
| CB21-499- | SYNMH | VIWYDGSNKDY | PGEGDY | RASQGVRN | GASSLQS | LQQNSYPWT |
| 037 | | ADSVKG | | DFG | | |
| CB21-499- | SYQMH | VIWYDGSNKDY | PGEGDY | RASQGVRN | GASSLQS | LQQNSYPWT |
| 038 | | ADSVKG | | DFG | | |
| CB21-499- | SYEMH | VIWYDGSNKDY | PGEGDY | RASQGVRN | GASSLQS | LQQNSYPWT |
| 039 | | ADSVKG | | DFG | | |
| CB21-499- | SYRMH | VIWYDGSNKDY | PGEGDY | RASQGVRN | GASSLQS | LQQNSYPWT |
| 040 | | ADSVKG | | DFG | | |
| CB21-499- | SYWMH | VIWYDGSNKDY | PGEGDY | RASQGVRN | GASSLQS | LQQNSYPWT |
| 041 | | ADSVKG | | DFG | | |
| CB21-499- | SYPMH | VIWYDGSNKDY | PGEGDY | RASQGVRN | GASSLQS | LQQNSYPWT |
| 042 | | ADSVKG | | DFG | | |
| CB21-499- | SYGMH | VIWYDGSNKDY | PGEGDY | RASQGVRN | GASSLQS | LQQNSYPWT |
| 043 | | ADSVKG | | DFG | | |
| CB21-499- | SYGMH | VIWYDGSNKDY | PGEGDY | RASQGVRN | GASSLQS | LQQNSYPWT |
| 044 | | ADSVKG | | DFG | | |
| CB21-499- | SYGMH | VIWYDGSNKDY | PGEGDY | RASQGVRN | GASSLQS | LQQNSYPWT |
| 045 | | ADSVKG | | DFG | | |
| CB21-499- | SYGMH | VIWYDGSNKDY | PGEGDY | RASQGVRN | GASSLQS | LQQNSYPWT |
| 046 | | ADSVKG | | DFG | | |
| CB21-499- | SYGMH | VIWYDGSNKDY | PGEGDY | RASQGVRN | GASSLQS | LQQNSYPWT |
| 047 | | ADSVKG | | DFG | | |
| CB21-499- | SYGMH | VIWYDGSNKDY | PGEGDY | RASQGVRN | GASSLQS | LQQNSYPWT |
| 048 | | ADSVKG | | DFG | | |
| CB21-499- | SYGMH | VIWYDGSNKDY | PGEGDY | RASQGVRN | GASSLQS | LQQNSYPWT |
| 049 | | ADSVKG | | DFG | | |
| CB21-499- | SYGMH | VIWYDGSNTDY | PGEGDY | RASQGVRN | GASSLQS | LQQNSYPWT |
| 050 | | ADSVKG | | DFG | | |
| CB21-499- | SYGMH | VIWYDGSNIDY | PGEGDY | RASQGVRN | GASSLQS | LQQNSYPWT |
| 051 | | ADSVKG | | DFG | | |
| CB21-499- | SYGMH | VIWYDGSNNDY | PGEGDY | RASQGVRN | GASSLQS | LQQNSYPWT |
| 052 | | ADSVKG | | DFG | | |
| CB21-499- | SYGMH | VIWYDGSNRDY | PGEGDY | RASQGVRN | GASSLQS | LQQNSYPWT |
| 053 | | ADSVKG | | DFG | | |
| CB21-499- | SYGMH | VIWYDGSNKFY | PGEGDY | RASQGVRN | GASSLQS | LQQNSYPWT |
| 054 | | ADSVKG | | DFG | | |
| CB21-499- | SYGMH | VIWYDGSNKNY | PGEGDY | RASQGVRN | GASSLQS | LQQNSYPWT |
| 055 | | ADSVKG | | DFG | | |
| CB21-499- | SYGMH | VIWYDGSNKEY | PGEGDY | RASQGVRN | GASSLQS | LQQNSYPWT |
| 056 | | ADSVKG | | DFG | | |
| CB21-499- | SYGMH | VIWYDGSNKDY | PGEGDY | RASQGVRN | GASSLQS | LQQNSYPWT |
| 057 | | ADSVKG | | DFG | | |
| CB21-499- | SYGMH | VIWYDGSNKDY | PGEGDY | RASQGVRN | GASSLQS | LQQNSYPWT |
| 058 | | ADSVKG | | DFG | | |
| CB21-499- | SYGMH | VIWYDGSNKDY | PGEGDY | RASQGVRN | GASSLQS | LQQNSYPWT |
| 059 | | ADSVKG | | DFG | | |
| CB21-499- | SYGMH | VIWYDGSNKDY | PGEGDY | RASQGVRN | GASSLQS | LQQNSYPWT |
| 060 | | ADSVKG | | DFG | | |
| CB21-499- | SYGMH | VIWYDGSNKDY | PGEGDY | RASQGVRN | GASSLQS | LQQNSYPWT |
| 061 | | ADSVKG | | DFG | | |
| CB21-499- | SYGMH | VIWYDGSNKDY | PGEGDY | RASQGVRN | GASSLQS | LQQNSYPWT |
| 062 | | ADSVKG | | DFG | | |
| CB21-499- | SYGMH | VIWYDGSNKDY | PGEGDY | RASQIVRN | GASSLQS | LQQNSYPWT |
| 063 | | ADSVKG | | DFG | | |
| CB21-499- | SYGMH | VIWYDGSNKDY | PGEGDY | RASQSVRN | GASSLQS | LQQNSYPWT |
| 064 | | ADSVKG | | DFG | | |
| CB21-499- | SYGMH | VIWYDGSNKDY | PGEGDY | RASQGIRN | GASSLQS | LQQNSYPWT |
| 065 | | ADSVKG | | DFG | | |
| CB21-499- | SYGMH | VIWYDGSNKDY | PGEGDY | RASQGVRN | GASSLQS | LQQNSYPWT |
| 066 | | ADSVKG | | EFG | | |
| CB21-499- | SYGMH | VIWYDGSNKDY | PGEGDY | RASQGVRN | GASSLQS | LQQNSYPWT |
| 067 | | ADSVKG | | LFG | | |
| CB21-499- | SYGMH | VIWYDGSNKDY | PGEGDY | RASQGVRN | GASSLQS | LQQNSYPWT |
| 068 | | ADSVKG | | YFG | | |
| CB21-499- | SYGMH | VIWYDGSNKDY | PGEGDY | RASQGVRN | GASSLQS | LQQNSYPWT |
| 069 | | ADSVKG | | DFG | | |
| CB21-499- | SYGMH | VIWYDGSNKDY | PGEGDY | RASQGVRN | GASSLQS | LQQNSYPWT |
| 070 | | ADSVKG | | DFG | | |
| CB21-499- | SYGMH | VIWYDGSNKDY | PGEGDY | RASQGVRN | GASSLQS | LQQNSYPWT |
| 071 | | ADSVKG | | DFG | | |
| CB21-499- | SYGMH | VIWYDGSNKDY | PGEGDY | RASQGVRN | GASQLQS | LQQNSYPWT |
| 072 | | ADSVKG | | DFG | | |
| CB21-499- | SYGMH | VIWYDGSNKDY | PGEGDY | RASQGVRN | GASNLQS | LQQNSYPWT |
| 073 | | ADSVKG | | DFG | | |
| CB21-499- | SYGMH | VIWYDGSNKDY | PGEGDY | RASQGVRN | GASTLQS | LQQNSYPWT |
| 074 | | ADSVKG | | DFG | | |
| CB21-499- | SYGMH | VIWYDGSNKDY | PGEGDY | RASQGVRN | GASSLQS | LQQNSYPWT |
| 075 | | ADSVKG | | DFG | | |
| CB21-499- | SYGMH | VIWYDGSNKDY | PGEGDY | RASQGVRN | GASSLQS | LQQNSYPWT |
| 076 | | ADSVKG | | DFG | | |
| CB21-499- | SYGMH | VIWYDGSNKDY | PGEGDY | RASQGVRN | GASSLQS | LQQNSYPWT |
| 077 | | ADSVKG | | DFG | | |
| CB21-499- | SYGMH | VIWYDGSNKDY | PGEGDY | RASQGVRN | GASSLQS | LQQNSYPWT |
| 078 | | ADSVKG | | DFG | | |
| CB21-499- | SYGMH | VIWYDGSNKDY | PGEGDY | RASQGVRN | GASSLQS | LQQNSYPWT |
| 079 | | ADSVKG | | DFG | | |
| CB21-499- | SYGMH | VIWYDGSNKDY | PGEGDY | RASQGVRN | GASSLQS | LQQNSYPWT |
| 080 | | ADSVKG | | DFG | | |
| CB21-499- | SYGMH | VIWYDGSNKDY | PGEGDY | RASQGVRN | GASSLQS | LQQNSYPWT |
| 081 | | ADSVKG | | DFG | | |
| CB21-499- | SYAMH | VISYDGSNKYY | PGEGDY | RASQGVRN | GASSLQS | LQQNSYPWT |
| 082 | | ADSVKG | | DFG | | |
| CB21-499- | SYGMH | VIWYDASNKDY | PGEGDY | RASQGVRN | GASSLQS | LQQNSYPWT |
| 083 | | APSVKG | | DFG | | |
| CB21-499- | SYGMH | VIWYDASNKDY | PGEGDY | RASQGVRN | GASSLQS | LQQNSYPWT |
| 084 | | VPSVKG | | DFG | | |
| CB21-499- | SYGMH | VIWYDASNKDY | PGEGDY | RASQGVRN | GASSLQS | LQQNSYPWT |
| 085 | | APSVKG | | DFG | | |
| CB21-499- | SYGMH | VIWYDASNKDY | PGEGDY | RASQGVRN | GASSLQS | LQQNSYPWT |
| 086 | | VPSVKG | | DFG | | |
| CB21-499- | SYGMH | VIWYDASNKDY | PGEGDY | RASQGVRN | GASSLQS | LQQNSYPWT |
| 087 | | APSVKG | | DFG | | |
| CB21-499- | SYGMH | VIWYDASNKDY | PGEGDY | RASQGVRN | GASSLQS | LQQNSYPWT |
| 088 | | VPSVKG | | DFG | | |
| CB21-499- | SYGMH | VIWYDASNKDY | PGEGDY | RASQGVRN | GASSLQS | LQQNSYPWT |
| 089 | | VPSVKG | | DFG | | |
| CB21-499- | VYGMH | VIWYDASNKDY | PGEGDY | RASQGVRN | GASSLQS | LQQNSYPWT |
| 090 | | APSVKG | | DFG | | |
| CB21-499- | TYGMH | VIWYDASNKDY | PGEGDY | RASQGVRN | GASSLQS | LQQNSYPWT |
| 091 | | APSVKG | | DFG | | |
| CB21-499- | SYGMN | VIWYDASNKDY | PGEGDY | RASQGVRN | GASSLQS | LQQNSYPWT |
| 092 | | APSVKG | | DFG | | |
| CB21-499- | SYGMH | IIWYDASNKDY | PGEGDY | RASQGVRN | GASSLQS | LQQNSYPWT |
| 093 | | APSVKG | | DFG | | |
| CB21-499- | SYGMH | MIWYDASNKDY | PGEGDY | RASQGVRN | GASSLQS | LQQNSYPWT |
| 094 | | APSVKG | | DFG | | |
| CB21-499- | SYGMH | RIWYDASNKDY | PGEGDY | RASQGVRN | GASSLQS | LQQNSYPWT |
| 095 | | APSVKG | | DFG | | |
| CB21-499- | SYGMH | DIWYDASNKDY | PGEGDY | RASQGVRN | GASSLQS | LQQNSYPWT |
| 096 | | APSVKG | | DFG | | |
| CB21-499- | SYGMH | EIWYDASNKDY | PGEGDY | RASQGVRN | GASSLQS | LQQNSYPWT |
| 097 | | APSVKG | | DFG | | |
| CB21-499- | SYGMH | AIWYDASNKDY | PGEGDY | RASQGVRN | GASSLQS | LQQNSYPWT |
| 098 | | APSVKG | | DFG | | |
| CB21-499- | SYGMH | VIWYDASNKDY | PGEGDY | RASQGVRN | GASSLQS | LQQNSYPWT |
| 099 | | APSVKG | | DFG | | |
| CB21-499- | SYGMH | VIWYDASNKDY | PGEGDY | RASQGVRN | GASSLQS | LQQNSYPWT |
| 100 | | APSVKG | | DFG | | |
| CB21-499- | SYGMH | VIWYDASNKDY | PGEGDY | RASQGVRN | GASSLQS | LQQNSYPWT |
| 101 | | APSVKG | | DFG | | |
| CB21-499- | SYGMH | VIWYDASNKDY | PGEGDY | RASQGVRN | GASSLQS | LQQNSYPWT |
| 102 | | APSVKG | | DFG | | |
| CB21-499- | SYGMH | VIWYDASNKDY | PGEGDY | RASQGVRN | GASSLQS | LQQNSYPWT |
| 103 | | APSVKG | | DFG | | |
| CB21-499- | SYGMH | VIWYDASNKDY | PGEGDY | RASQGVRN | GASSLQS | LQQNSYPWT |
| 104 | | APSVKG | | DFG | | |
| CB21-499- | SYGMH | VIWYDASNKDY | PGEGDY | RASQGVRN | GASSLQS | LQQNSYPWT |
| 105 | | APSVKG | | DFG | | |
| CB21-499- | SYGMH | VIWYDASNKDY | PGEGDY | RASQGVRN | GASSLQS | LQQNSYPWT |
| 106 | | APSVKG | | DFG | | |
| CB21-499- | SYGMH | VIWYDASNKDY | PGEGDY | RASQGVRN | GASSLQS | LQQNSYPWT |
| 107 | | APSVKG | | DFG | | |
| CB21-499- | SYGMH | VIWYDASNKDY | PGEGDY | RASQGVRN | GASSLQS | LQQNSYPWT |
| 108 | | APSVKG | | DFG | | |
| CB21-499- | SYGMH | VIWYDASNKDY | PGEGDY | RASQGVRN | GASSLQS | LQQNSYPWT |
| 109 | | APSVKG | | DFG | | |
| CB21-499- | SYGMH | VIWYDASNKDY | PGEGDY | RASQGVRN | GASSLQS | LQKNSYPWT |
| 110 | | APSVKG | | DFG | | |
| CB21-499- | SYGMH | VIWYDASNKDY | PGEGCY | RASQGVRN | GASSLQS | LQCNSYPWT |
| 111 | | APSVKG | | DFG | | |
| CB21-499- | SYGMH | VIWYDASNKDY | PGEGDY | RASQGVRN | GASSLQS | LQQNSYPWT |
| 112 | | APSVKG | | DFG | | |
| CB21-499- | SYGMH | VIWYDASNKDY | PGEGDY | RASQGVRN | GASSLQS | LQQNSYPWT |
| 113 | | APSVKG | | DFG | | |
| CB21-499- | DYGMH | VIWYDASNKDY | PGEGDY | RASQGVRN | GASSLQS | LQQNSYPWT |
| 114 | | APSVKG | | DFG | | |
| CB21-499- | SDGMH | VIWYDASNKDY | PGEGDY | RASQGVRN | GASSLQS | LQQNSYPWT |
| 115 | | APSVKG | | DFG | | |
| CB21-499- | SYGMH | VIWYDASNKDY | PGEGDY | RASQGVRN | GASSLQS | LQQNSYPWT |
| 116 | | APSVKG | | DFG | | |
| CB21-499- | SYGMH | VIWYDASNKDY | PGEGDY | RASQGVRN | GASSLQS | LQQNSYPWT |
| 117 | | APSVKG | | DFG | | |
| CB21-499- | SYGMH | VIWYDASNKDY | PGEGDY | RASQGVRN | GASSLQS | LQQNSYPWT |
| 118 | | APSVKG | | DFG | | |
| CB21-499- | SYGMH | VIWYDASNKDY | PGEGDY | RASQGVRN | GASSLQS | LQQNSYPWT |
| 119 | | APSVKG | | DFG | | |
| CB21-499- | SYGMH | VIWYDASNKDY | PGEGDY | RASQGVRN | GASSLQS | LQQNSYPWT |
| 120 | | APSVKG | | DFG | | |
| CB21-499- | SYGMH | VIWYDASNKDY | PGEGDY | RASQGVRN | GASSLQS | LQQNSYPWT |
| 121 | | APSVKG | | DFG | | |
| CB21-499- | SYGMH | VIWYDASNKDY | PGECDY | RASQGVRN | GASSLQS | LQQNSYPWT |
| 122 | | APSVKG | | DFG | | |
| CB21-499- | SYGMH | VIWYDASNKDY | PGEGDY | RASQGVRN | GASSLQS | LQQNSYPWT |
| 123 | | APSVKG | | DFG | | |
| CB21-499- | SYGMH | VIWYDASNKDY | PGEGDY | RASQGVRN | GASSLQS | LQQNSYPWT |
| 124 | | APSVKG | | DFG | | |
| CB21-499- | PYGMH | VIWYDASNKDY | PGEGDY | RASQGVRN | GASSLQS | LQQNSYPWT |
| 125 | | APSVKG | | DFG | | |
| CB21-499- | SYPMH | VIWYDASNKDY | PGEGDY | RASQGVRN | GASSLQS | LQQNSYPWT |
| 126 | | APSVKG | | DFG | | |
| CB21-499- | SYGMH | VIWYDAPNKDY | PGEGDY | RASQGVRN | GASSLQS | LQQNSYPWT |
| 127 | | APSVKG | | DFG | | |
| CB21-499- | SYGMH | VISYDASNKDY | PGEGDY | RASQGVRN | GASSLQS | LQQNSYPWT |
| 128 | | APSVKG | | DFG | | |
| CB21-499- | SYGMH | VINYDASNKDY | PGEGDY | RASQGVRN | GASSLQS | LQQNSYPWT |
| 129 | | APSVKG | | DFG | | |
| CB21-499- | SYGMH | VIDYDASNKDY | PGEGDY | RASQGVRN | GASSLQS | LQQNSYPWT |
| 130 | | APSVKG | | DFG | | |
| CB21-499- | SYGMH | VIRYDASNKDY | PGEGDY | RASQGVRN | GASSLQS | LQQNSYPWT |
| 131 | | APSVKG | | DFG | | |
| CB21-499- | SYGMH | VIKYDASNKDY | PGEGDY | RASQGVRN | GASSLQS | LQQNSYPWT |
| 132 | | APSVKG | | DFG | | |
| CB21-499- | SYGMH | VIAYDASNKDY | PGEGDY | RASQGVRN | GASSLQS | LQQNSYPWT |
| 133 | | APSVKG | | DFG | | |
| CB21-499- | SYGMH | VIWDDASNKDY | PGEGDY | RASQGVRN | GASSLQS | LQQNSYPWT |
| 134 | | APSVKG | | DFG | | |
| CB21-499- | SYGMH | VIWPDASNKDY | PGEGDY | RASQGVRN | GASSLQS | LQQNSYPWT |
| 135 | | APSVKG | | DFG | | |
| CB21-499- | SYGMH | VIWNDASNKDY | PGEGDY | RASQGVRN | GASSLQS | LQQNSYPWT |
| 136 | | APSVKG | | DFG | | |
| CB21-499- | SYGMH | VIWKDASNKDY | PGEGDY | RASQGVRN | GASSLQS | LQQNSYPWT |
| 137 | | APSVKG | | DFG | | |
| CB21-499- | SYGMH | VIWGDASNKDY | PGEGDY | RASQGVRN | GASSLQS | LQQNSYPWT |
| 138 | | APSVKG | | DFG | | |
| CB21-499- | SYGMH | VIWSDASNKDY | PGEGDY | RASQGVRN | GASSLQS | LQQNSYPWT |
| 139 | | APSVKG | | DFG | | |
| CB21-499- | SYGMH | VIWYDASNKDY | PGEGDV | RASQGVRN | GASSLQS | LQQNSYPWT |
| 140 | | APSVKG | | DFG | | |
| CB21-499- | SYGMH | VIWYDASNKDY | PGEGDR | RASQGVRN | GASSLQS | LQQNSYPWT |
| 141 | | APSVKG | | DFG | | |
| CB21-499- | SYGMH | VIWYDASNKDY | PGEGDP | RASQGVRN | GASSLQS | LQQNSYPWT |
| 142 | | APSVKG | | DFG | | |
| CB21-499- | SYGMH | VIWYDASNKDY | PGEGDA | RASQGVRN | GASSLQS | LQQNSYPWT |
| 143 | | APSVKG | | DFG | | |
| CB21-499- | SYGMH | VIWYDASNKDY | PGEGDY | RASQGVRN | GDSSLQS | LQQNSYPWT |
| 144 | | APSVKG | | DFG | | |
| CB21-499- | SYGMH | VIWYDASNKDY | PGEGDY | RASQGVRN | GADSLQS | LQQNSYPWT |
| 145 | | APSVKG | | DFG | | |
| CB21-499- | SYGMH | VIWYDASNKDY | PGEGDY | RASQGVRN | GDDSLQS | LQQNSYPWT |
| 146 | | APSVKG | | DFG | | |
| CB21-499- | SYGMH | VIWYDASNKDY | PGEGDY | RASQGVRN | GASSLQS | LQQNSYPWT |
| 147 | | APSVKG | | DFG | | |
| CB21-499- | SYGMH | VIWYDASNKDY | PGEGDY | RASQGVRN | AASSLQS | LQQNSYPWT |
| 148 | | APSVKG | | DFG | | |
| CB21-499- | SYGMH | VIWYDASNKDY | PGEGDY | RASQGVRN | GASSLQS | LQQNSYPWT |
| 149 | | APSVKG | | DFG | | |
| CB21-499- | SYGMH | VIWYDASNKDY | PGEGDY | RASQGVRN | GASSLQS | LQQNSYPWT |
| 150 | | APSVKG | | DFG | | |
| CB21-499- | SYGMH | VIWYDASNKDY | PGEGDY | RASQGVRN | GASSLQS | LQQNSYPWT |
| 151 | | APSVKG | | DFG | | |
| CB21-499- | SYGMH | VIWYDASNKDY | PGEGDY | RASQGVRN | GASSLCS | LQQNSYPWT |
| 152 | | APSVKG | | DFG | | |
| CB21-499- | SYGMH | VIWYDASNKDY | PGEGDY | RASQGVRN | DASSLQS | LQQNSYPWT |
| 153 | | APSVKG | | DFG | | |
| CB21-499- | SYGMH | VIWYDASNKDY | PGEGDY | RASQGVRN | EASSLQS | LQQNSYPWT |
| 154 | | APSVKG | | DFG | | |
| CB21-499- | SYGMH | VIWYDASNKDY | PGEGDY | RASQGVRN | KASSLQS | LQQNSYPWT |
| 155 | | APSVKG | | DFG | | |
| CB21-499- | SYGMH | VIWYDASNKDY | PGEGDY | RASQGVRN | LASSLQS | LQQNSYPWT |
| 156 | | APSVKG | | DFG | | |
| CB21-499- | SYGMH | VIWYDASNKDY | PGEGDY | RASQGVRN | SASSLQS | LQQNSYPWT |
| 157 | | APSVKG | | DFG | | |
| CB21-499- | SYGMH | VIWYDASNKDY | PGEGDY | RASQGVRN | GVSSLQS | LQQNSYPWT |
| 158 | | APSVKG | | DFG | | |
| CB21-499- | SYGMH | VIWYDASNKDY | PGEGDY | RASQGVRN | GESSLQS | LQQNSYPWT |
| 159 | | APSVKG | | DFG | | |
| CB21-499- | SYGMH | VIWYDASNKDY | PGEGDY | RASQGVRN | GPSSLQS | LQQNSYPWT |
| 160 | | APSVKG | | DFG | | |
| CB21-499- | SYGMH | VIWYDASNKDY | PGEGDY | RASQGVRN | GATSLQS | LQQNSYPWT |
| 161 | | APSVKG | | DFG | | |
| CB21-499- | SYGMH | VIWYDASNKDY | PGEGDY | RASQGVRN | GAPSLQS | LQQNSYPWT |
| 162 | | APSVKG | | DFG | | |
| CB21-499- | SYGMH | VIWYDASNKDY | PGEGDY | RASQGVRN | GASRLQS | LQQNSYPWT |
| 163 | | APSVKG | | DFG | | |
| CB21-499- | SYGMH | VIWYDASNKDY | PGEGDY | RASQGVRN | GASKLQS | LQQNSYPWT |
| 164 | | APSVKG | | DFG | | |
| CB21-499- | SYGMH | VIWYDASNKDY | PGEGDY | RASQGVRN | GASDLQS | LQQNSYPWT |
| 165 | | APSVKG | | DFG | | |
| CB21-499- | SYGMH | VIWYDASNKDY | PGEGDY | RASQGVRN | GASILQS | LQQNSYPWT |
| 166 | | APSVKG | | DFG | | |
| CB21-499- | SYGMH | VIWYDASNKDY | PGEGDY | RASQGVRN | GASLLQS | LQQNSYPWT |
| 167 | | APSVKG | | DFG | | |
| CB21-499- | SYGMH | VIWYDASNKDY | PGEGDY | RASQGVRN | GASSRQS | LQQNSYPWT |
| 168 | | APSVKG | | DFG | | |
| CB21-499- | SYGMH | VIWYDASNKDY | PGEGDY | RASQGVRN | GASSPQS | LQQNSYPWT |
| 169 | | APSVKG | | DFG | | |
| CB21-499- | SYGMH | VIWYDASNKDY | PGEGDY | RASQGVRN | GASSLPS | LQQNSYPWT |
| 170 | | APSVKG | | DFG | | |
| CB21-499- | SYGMH | VIWYDASNKDY | PGEGDY | RASQGVRN | GASSLAS | LQQNSYPWT |
| 171 | | APSVKG | | DFG | | |
| CB21-499- | SYGMH | VIWYDASNKDY | PGEGDY | RASQGVRN | GASSLES | LQQNSYPWT |
| 172 | | APSVKG | | DFG | | |
| CB21-499- | SYGMH | VIWYDASNKDY | PGEGDY | RASQGIRN | AASSLQS | LQHNSYPWT |
| 174 | | APSVKG | | DLG | | |
| CB21-499- | SYGMH | VIWYDASNKDY | PGEGDY | RASQSVSS | DASNRAT | QQRSNWPYT |
| 175 | | APSVKG | | YLA | | |
| CB21-499- | SYGMH | VIWYDASNKDY | PGEGDY | RASQSISSY | AASSLQS | QQSYSTPFT |
| 176 | | APSVKG | | LN | | |
| CB21-499- | SYGMH | VIWYDASNKEY | PGEGDY | RASQGVRN | GASSLQS | LQQNSYPWT |
| 177 | | APSVKG | | DFG | | |
| CB21-499- | SYGMH | VIWYDASNKEY | PGEGDY | RASQSVSS | GASSLQS | LQQNSYPWT |
| 178 | | APSVKG | | YLA | | |
| CB21-499- | SYGMH | VIWYDASNKDY | PGEGDY | RASQSVSS | GASSLQS | LQQNSYPWT |
| 179 | | APSVKG | | YLA | | |

[0010] In a related aspect, the present invention provides hLY6G6D binding proteins comprising an immunoglobulin variable region that binds hLY6G6D, wherein the immunoglobulin variable region comprises a heavy chain variable region and a light chain variable region as recited for one of the Identifiers in Table 2.

TABLE 2
(SEQ ID NOs: 1994-2657, with numbering across rows (so row 1 is
SEQ ID NOs: 1994-1995, row 2 is SEQ ID NOs: 1996-1997, etc.):

| Identifier | VH | VL |
|---|---|---|
| CB21-469 | EVQLVESGGGLVQPGGSLRLSCAASG | DVVMTQTPLSSPVTLGQSASISCRSSQ |
| | FTFSSYAMNWVRQAPGKGLEWVSGI | SLVHSDGNTYLNWLHQRPGQPPRLLI |
| | SGNGGRIYYADSVKGRFTISRDNSKN | YKISNRFSGVPDRFSGSGAGTDFTLKI |
| | TLYLQMNSLRVEDTAVYYCAKDLDV | SRVEAEDVGVYYCMQATQFPLTFGG |
| | WGKGTTVTVSS | GTKLEIK |
| CB21-470 | EVQLVESGGGVVQPGRSLRLSCAASG | DIQMTQSPSSLSASVGDRVTITCRASQ |
| | FTFNSYGMHWVRQAPGKGLEWVAVL | GIRNDLTWYQQKPGKAPKRLIYDTSS |
| | WYDGINKNYADSVKGRFAISRDNSKN | LQSGVPSRFSGSRSGTEFTLTISSLQPE |
| | TLYLQMNSLRVEDTAVYYCVRVQGD | DFASYFCLQHNSYPFTFGQGTKLEIK |
| | YWGQGTLVTVSS | |
| CB21-471 | EVQLVESGGGVVQPGRSLRLSCAASG | DIQMTQSPSSLSASVGDRVTITCRASQ |
| | FTFSSYGMHWVRQVPGKGLEWVAVI | GIRNDFGWYQQKPGKAPKRLIYGASS |
| | WYDGSNKDYVDSVKGRFTISRDNSK | LQSGVPSRFSGSGSGTEFTLTISSLQPE |
| | NTLYLQMNSLRAEDTAVYYCARPGE | DFATYYCLQQNSYPWTFGQGTKVEIK |
| | GDYWGQGTLVTVSS | |
| CB21-477 | EVQLVESGGGVVQPGRSLRLSCAASG | DIQMTQSPSSLSASVGDRVTITCRASQ |
| | FTFSSYGMHWVRQAPGKGLEWVAVI | GIRNDLGWYQQKPGRAPKRLIYAASS |
| | WYDGSNKDYADSVKGRFTISRDNSK | LQSGVPSRFSGSGSGTEFTLTISSLQPE |
| | NTLYLQMNSLRAEDTAVYYCARPGE | DFATYYCLQQNSYPWTFGQGTKVEIK |
| | GDYWGQGTLVTVSS | |
| CB21-500 | EVQLVESGGGLVQPGGSLRLSCAASG | DVVMTQTPLSSPVTLGQPASISCRSSQ |
| | FTFSSYAMNWVRQVPGKGLEGVSGM | NLVHSDGNTYLNWLQQRPGQPPRLLI |
| | SGSGGRIYYADSVKGRFTMSRDNSKN | YKISNRFSGVPDRFSGSGAGTDFTLKI |
| | MVYLQMNSLRAEDTALYYCAKDLDV | SRVEAEDVGVYYCMQATQFPLTFGG |
| | WGKGTTVTVSS | GTKLEIK |
| CB21-502 | EVQLVESGGGVVQPGRSLRLSCAASG | DIQMTQSPSSLSASVGDRVTITCRASQ |
| | FTFSSYGMHWVRQAPGKGLEWVAVL | GIRNDLTWYQQKPGKAPKRLIYDTSS |
| | WYDGINKNYVDSVKGRFAISRDNSK | LQSGVPSRFSGSGSGTDFTLTISSLQPE |
| | NTLYLQMNSLRVEDTAVYFCVRVQG | DFASYFCLQHNIYPFTFGQGTKLEIK |
| | DYWGQGTLVTVSS | |
| CB21-512 | EVQLVESGGGVVQPGRSLRLSCAASG | DIQMTQSPSSLSASVGDRVTITCRASQ |
| | FTFSSYGMHWVRQAPGKGLEWVAVL | GIRNDLTWYQQKPGKAPKRLIYDTSS |
| | WYDGINKNYADSVKGRFAISRDNSKN | LQSGVPSRFSGSRSGTEFTLTISSLQPE |
| | TLYLQMNSLRVEDTAVYFCVRVQGD | DFASYFCLQHNIYPFTFGQGTKLEIK |
| | YWGQGTLVTVSS | |
| CB21-513 | EVQLVDSGGGLVEPGGSLRLSCAASG | DIVMTQTPLSSPVTLGQPASISCRSSQS |
| | FTFSSYAMTWVRQAPGKGLEWVSGIS | LVHSDGNTYLNWLQQRPGQPPRLLIY |
| | GSGGVTDYADSVKGRFTISRDNSKNT | KISNRFSGVPDRFSGSGAGTDFTLKIS |
| | LYMQMNSLRAEDTAVYYCAKDLGV | RVEAEDVGVYYCMQATQFPLTFGGG |
| | WGKGTTVTVSS | TKVEIK |
| CB21-522 | EVQLVQSGAEVKKPGASVKVSCKAS | DVVMTQSPLSLPVTLGQPASISCRSSQ |
| | GYTFTGYFIHWVRQAPGQGLEWMG | SLVYSDGNTYLNWFQQRPGQSPRRLI |
| | WINPNSGGTYYAQEFQGRVTMTRDTS | YKVSNRDSGVPERFSGIGSGTDFTLEI |
| | ISTAYMELIRLRSDDSAVYYCARDISL | SRVEAEDVGVYYCMQGSHWPLTFGG |
| | VGDYWGQGTLVTVSS | GTKVEIK |
| CB21-498 | EMQLVESGGGLVQPGGSLRLSCAASG | DVVMTQTPLSSPVTLGQPASISCRSSQ |
| | FTFSSYAMNWVRQAPGKGLECVSGIS | SLVHSDGNTYLNWLQQRPGQPPRLLI |
| | GNGGRIYYAESVKGRFTISRDNSKSTF | YKISNRFSGVPDRFSGSGAGTDFTLKI |
| | YLQMNSLRAEDTAVYYCAKDLDVW | SRVEAEDVGVYYCMQATQFPLTFGG |
| | GKGTTVTVSS | GTKVEIK |
| CB21-498-001 | EVQLVESGGGLVQPGGSLRLSCAASG | DVVMTQTPLSSPVTLGQPASISCRSSQ |
| | FTFSSYAMNWVRQAPGKGLEWVSGI | SLVHSDGNTYLNWLQQRPGQPPRLLI |
| | SGNGGRIYYAESVKGRFTISRDNSKST | YKISNRFSGVPDRFSGSGAGTDFTLKI |
| | FYLQMNSLRAEDTAVYYCAKDLDVW | SRVEAEDVGVYYCMQATQFPLTFGG |
| | GKGTTVTVSS | GTKVEIK |
| CB21-498-002 | EVQLVESGGGLVQPGGSLRLSCAASG | DVVMTQTPLSSPVTLGQPASISCRSSQ |
| | FTFSSYAMNWVRQAPGKGLESVSGIS | SLVHSDGNTYLNWLQQRPGQPPRLLI |
| | GNGGRIYYAESVKGRFTISRDNSKSTF | YKISNRFSGVPDRFSGSGAGTDFTLKI |
| | YLQMNSLRAEDTAVYYCAKDLDVW | SRVEAEDVGVYYCMQATQFPLTFGG |
| | GKGTTVTVSS | GTKVEIK |
| CB21-498-003 | EVQLVESGGGLVQPGGSLRLSCAASG | DVVMTQTPLSSPVTLGQPASISCRSSQ |
| | FTFSSYAMNWVRQAPGKGLECVSGIS | SLVHSDGNTYLNWLQQRPGQPPRLLI |
| | GNAGRIYYAESVKGRFTISRDNSKSTF | YKISNRFSGVPDRFSGSGAGTDFTLKI |
| | YLQMNSLRAEDTAVYYCAKDLDVW | SRVEAEDVGVYYCMQATQFPLTFGG |
| | GKGTTVTVSS | GTKVEIK |
| CB21-498-004 | EVQLVESGGGLVQPGGSLRLSCAASG | DVVMTQTPLSSPVTLGQPASISCRSSQ |
| | FTFSSYAMNWVRQAPGKGLECVSGIS | SLVHSDGNTYLNWLQQRPGQPPRLLI |
| | GNPGRIYYAESVKGRFTISRDNSKSTF | YKISNRFSGVPDRFSGSGAGTDFTLKI |
| | YLQMNSLRAEDTAVYYCAKDLDVW | SRVEAEDVGVYYCMQATQFPLTFGG |
| | GKGTTVTVSS | GTKVEIK |
| CB21-498-005 | EVQLVESGGGLVQPGGSLRLSCAASG | DVVMTQTPLSSPVTLGQPASISCRSSQ |
| | FTFSSYAMNWVRQAPGKGLECVSGIS | SLVHSDGNTYLNWLQQRPGQPPRLLI |
| | GQGGRIYYAESVKGRFTISRDNSKSTF | YKISNRFSGVPDRFSGSGAGTDFTLKI |
| | YLQMNSLRAEDTAVYYCAKDLDVW | SRVEAEDVGVYYCMQATQFPLTFGG |
| | GKGTTVTVSS | GTKVEIK |
| CB21-498-006 | EVQLVESGGGLVQPGGSLRLSCAASG | DVVMTQTPLSSPVTLGQPASISCRSSQ |
| | FTFSSYAMNWVRQAPGKGLECVSGIS | SLVHSDGNTYLNWLQQRPGQPPRLLI |
| | GSGGRIYYAESVKGRFTISRDNSKSTF | YKISNRFSGVPDRFSGSGAGTDFTLKI |
| | YLQMNSLRAEDTAVYYCAKDLDVW | SRVEAEDVGVYYCMQATQFPLTFGG |
| | GKGTTVTVSS | GTKVEIK |
| CB21-498-007 | EVQLVESGGGLVQPGGSLRLSCAASG | DVVMTQTPLSSPVTLGQPASISCRSSQ |
| | FTFSSYAMNWVRQAPGKGLECVSGIS | SLVHSDGNTYLNWLQQRPGQPPRLLI |
| | GNGGRIYYAESVKGRFTISRDNSKSTL | YKISNRFSGVPDRFSGSGAGTDFTLKI |
| | YLQMNSLRAEDTAVYYCAKDLDVW | SRVEAEDVGVYYCMQATQFPLTFGG |
| | GQGTTVTVSS | GTKVEIK |
| CB21-498-008 | EVQLVESGGGLVQPGGSLRLSCAASG | DVVMTQTPLSSPVTLGQPASISCRSSQ |
| | FTFSSYAMNWVRQAPGKGLECVSGIS | SLVHSDGNTYLNWLQQRPGQPPRLLI |
| | GNGGRIYYAESVKGRFTISRDNSKSTF | YKISNRFSGVPDRFSGSGAGTDFTLKI |
| | YLQMNSLRAEDTAVYYCAKDLDVW | SRVEAEDVGVYYCMQATQFPLTFGG |
| | GKGTTVTVSS | GTKVEIK |
| CB21-498-009 | EVQLVESGGGLVQPGGSLRLSCAASG | DVVMTQTPLSSPVTLGQPASISCRSSQ |
| | FTFSSYAMNWVRQAPGKGLECVSGIS | SLVHSDGNTYLNWLQQRPGQPPRLLI |
| | GNGGSIYYAESVKGRFTISRDNSKSTF | YKISNRFSGVPDRFSGSGAGTDFTLKI |
| | YLQMNSLRAEDTAVYYCAKDLDVW | SRVEAEDVGVYYCMQATQFPLTFGG |
| | GKGTTVTVSS | GTKVEIK |
| CB21-498-010 | EVQLVESGGGLVQPGGSLRLSCAASG | DVVMTQTPLSSPVTLGQPASISCRSSQ |
| | FTFSSYAMNWVRQAPGKGLECVSGIS | SLVHSDGNTYLNWLQQRPGQPPRLLI |
| | GNGGRIYYAESVKGRFTISRDNSKNTF | YKISNRFSGVPDRFSGSGAGTDFTLKI |
| | YLQMNSLRAEDTAVYYCAKDLDVW | SRVEAEDVGVYYCMQATQFPLTFGG |
| | GKGTTVTVSS | GTKVEIK |
| CB21-498-011 | EMQLVESGGGLVQPGGSLRLSCAASG | DVVMTQTPLSSPVTLGQPASISCRSSQ |
| | FTFSSYAMNWVRQAPGKGLECVSGIS | SLVHSDANTYLNWLQQRPGQPPRLLI |
| | GNGGRIYYAESVKGRFTISRDNSKSTF | YKISNRFSGVPDRFSGSGAGTDFTLKI |
| | YLQMNSLRAEDTAVYYCAKDLDVW | SRVEAEDVGVYYCMQATQFPLTFGG |
| | GKGTTVTVSS | GTKVEIK |
| CB21-498-012 | EMQLVESGGGLVQPGGSLRLSCAASG | DVVMTQTPLSSPVTLGQPASISCRSSQ |
| | FTFSSYAMNWVRQAPGKGLECVSGIS | SLVHSDINTYLNWLQQRPGQPPRLLIY |
| | GNGGRIYYAESVKGRFTISRDNSKSTF | KISNRFSGVPDRFSGSGAGTDFTLKIS |
| | YLQMNSLRAEDTAVYYCAKDLDVW | RVEAEDVGVYYCMQATQFPLTFGGG |
| | GKGTTVTVSS | TKVEIK |
| CB21-498-013 | EMQLVESGGGLVQPGGSLRLSCAASG | DVVMTQTPLSSPVTLGQPASISCRSSQ |
| | FTFSSYAMNWVRQAPGKGLECVSGIS | SLVHSIGNTYLNWLQQRPGQPPRLLIY |
| | GNGGRIYYAESVKGRFTISRDNSKSTF | KISNRFSGVPDRFSGSGAGTDFTLKIS |
| | YLQMNSLRAEDTAVYYCAKDLDVW | RVEAEDVGVYYCMQATQFPLTFGGG |
| | GKGTTVTVSS | TKVEIK |
| CB21-498-014 | EMQLVESGGGLVQPGGSLRLSCAASG | DVVMTQTPLSSPVTLGQPASISCRSSQ |
| | FTFSSYAMNWVRQAPGKGLECVSGIS | SLVHSEGNTYLNWLQQRPGQPPRLLI |
| | GNGGRIYYAESVKGRFTISRDNSKSTF | YKISNRFSGVPDRFSGSGAGTDFTLKI |
| | YLQMNSLRAEDTAVYYCAKDLDVW | SRVEAEDVGVYYCMQATQFPLTFGG |
| | GKGTTVTVSS | GTKVEIK |
| CB21-498-015 | EMQLVESGGGLVQPGGSLRLSCAASG | DVVMTQTPLSSPVTLGQPASISCRSSQ |
| | FTFSSYAMNWVRQAPGKGLECVSGIS | SLVHSDGNTYLAWLQQRPGQPPRLLI |
| | GNGGRIYYAESVKGRFTISRDNSKSTF | YKISNRFSGVPDRFSGSGAGTDFTLKI |
| | YLQMNSLRAEDTAVYYCAKDLDVW | SRVEAEDVGVYYCMQATQFPLTFGG |
| | GKGTTVTVSS | GTKVEIK |
| CB21-498-016 | EMQLVESGGGLVQPGGSLRLSCAASG | DVVMTQTPLSSPVTLGQPASISCRSSQ |
| | FTFSSYAMNWVRQAPGKGLECVSGIS | SLVHSDGNTYLNWLQQRPGQPPRLLI |
| | GNGGRIYYAESVKGRFTISRDNSKSTF | YKISNRFSGVPDRFSGSGSGTDFTLKI |
| | YLQMNSLRAEDTAVYYCAKDLDVW | SRVEAEDVGVYYCMQATQFPLTFGG |
| | GKGTTVTVSS | GTKVEIK |
| CB21-498-017 | EMQLVESGGGLVQPGGSLRLSCAASG | DVVMTQTPLSLPVTLGQPASISCRSSQ |
| | FTFSSYAMNWVRQAPGKGLECVSGIS | SLVHSDGNTYLNWLQQRPGQPPRLLI |
| | GNGGRIYYAESVKGRFTISRDNSKSTF | YKISNRFSGVPDRFSGSGAGTDFTLKI |
| | YLQMNSLRAEDTAVYYCAKDLDVW | SRVEAEDVGVYYCMQATQFPLTFGG |
| | GKGTTVTVSS | GTKVEIK |
| CB21-498-018 | EMQLVESGGGLVQPGGSLRLSCAASG | DVVMTQTPLSSPVTLGQPASISCRSSQ |
| | FTFSSYAMNWVRQAPGKGLECVSGIS | SLVHSDGNTYLNWYQQRPGQPPRLLI |
| | GNGGRIYYAESVKGRFTISRDNSKSTF | YKISNRFSGVPDRFSGSGAGTDFTLKI |
| | YLQMNSLRAEDTAVYYCAKDLDVW | SRVEAEDVGVYYCMQATQFPLTFGG |
| | GKGTTVTVSS | GTKVEIK |
| CB21-498-019 | EMQLVESGGGLVQPGGSLRLSCAASG | DVVMTQTPLSSPVTLGQPASISCRSSQ |
| | FTFSSYAMNWVRQAPGKGLECVSGIS | SLVHSDGNTYLNWLQQRPGQPPRLLI |
| | GNGGRIYYAESVKGRFTISRDNSKSTF | YKASNRFSGVPDRFSGSGAGTDFTLK |
| | YLQMNSLRAEDTAVYYCAKDLDVW | ISRVEAEDVGVYYCMQATQFPLTFGG |
| | GKGTTVTVSS | GTKVEIK |
| CB21-498-020 | EMQLVESGGGLVQPGGSLRLSCAASG | DVVMTQTPLSSPVTLGQPASISCRSSQ |
| | FTFSSYAMNWVRQAPGKGLESVSGIS | SLVHSDGNTYLNWLQQRPGQPPRLLI |
| | GNGGRIYYAESVKGRFTISRDNSKSTF | YKISNRFSGVPDRFSGSGAGTDFTLKI |
| | YLQMNSLRAEDTAVYYCAKDLDVW | SRVEAEDVGVYYCMQATQFPLTFGG |
| | GKGTTVTVSS | GTKVEIK |
| CB21-498-021 | EMQLVESGGGLVQPGGSLRLSCAASG | DVVMTQTPLSSPVTLGQPASISCRSSQ |
| | FTFSSYAMNWVRQAPGKGLEAVSGIS | SLVHSDGNTYLNWLQQRPGQPPRLLI |
| | GNGGRIYYAESVKGRFTISRDNSKSTF | YKISNRFSGVPDRFSGSGAGTDFTLKI |
| | YLQMNSLRAEDTAVYYCAKDLDVW | SRVEAEDVGVYYCMQATQFPLTFGG |
| | GKGTTVTVSS | GTKVEIK |
| CB21-498-022 | EMQLVESGGGLVQPGGSLRLSCAASG | DVVMTQTPLSSPVTLGQPASISCRSSQ |
| | FTFSSYAMNWVRQAPGKGLEGVSGIS | SLVHSDGNTYLNWLQQRPGQPPRLLI |
| | GNGGRIYYAESVKGRFTISRDNSKSTF | YKISNRFSGVPDRFSGSGAGTDFTLKI |
| | YLQMNSLRAEDTAVYYCAKDLDVW | SRVEAEDVGVYYCMQATQFPLTFGG |
| | GKGTTVTVSS | GTKVEIK |
| CB21-498-023 | EMQLVESGGGLVQPGGSLRLSCAASG | DVVMTQTPLSSPVTLGQPASISCRSSQ |
| | FTFSSYAMNWVRQAPGKGLEIVSGIS | SLVHSDGNTYLNWLQQRPGQPPRLLI |
| | GNGGRIYYAESVKGRFTISRDNSKSTF | YKISNRFSGVPDRFSGSGAGTDFTLKI |
| | YLQMNSLRAEDTAVYYCAKDLDVW | SRVEAEDVGVYYCMQATQFPLTFGG |
| | GKGTTVTVSS | GTKVEIK |
| CB21-498-024 | EMQLVESGGGLVQPGGSLRLSCAASG | DVVMTQTPLSSPVTLGQPASISCRSSQ |
| | FTFSSYAMNWVRQAPGKGLEPVSGIS | SLVHSDGNTYLNWLQQRPGQPPRLLI |
| | GNGGRIYYAESVKGRFTISRDNSKSTF | YKISNRFSGVPDRFSGSGAGTDFTLKI |
| | YLQMNSLRAEDTAVYYCAKDLDVW | SRVEAEDVGVYYCMQATQFPLTFGG |
| | GKGTTVTVSS | GTKVEIK |
| CB21-498-025 | EMQLVESGGGLVQPGGSLRLSCAASG | DVVMTQTPLSSPVTLGQPASISCRSSQ |
| | FTFSSYAMNWVRQAPGKGLETVSGIS | SLVHSDGNTYLNWLQQRPGQPPRLLI |
| | GNGGRIYYAESVKGRFTISRDNSKSTF | YKISNRFSGVPDRFSGSGAGTDFTLKI |
| | YLQMNSLRAEDTAVYYCAKDLDVW | SRVEAEDVGVYYCMQATQFPLTFGG |
| | GKGTTVTVSS | GTKVEIK |
| CB21-498-026 | EIQLVESGGGLVQPGGSLRLSCAASGF | DVVMTQTPLSSPVTLGQPASISCRSSQ |
| | TFSSYAMNWVRQAPGKGLECVSGISG | SLVHSDGNTYLNWLQQRPGQPPRLLI |
| | NGGRIYYAESVKGRFTISRDNSKSTFY | YKISNRFSGVPDRFSGSGAGTDFTLKI |
| | LQMNSLRAEDTAVYYCAKDLDVWG | SRVEAEDVGVYYCMQATQFPLTFGG |
| | KGTTVTVSS | GTKVEIK |
| CB21-498-027 | EAQLVESGGGLVQPGGSLRLSCAASG | DVVMTQTPLSSPVTLGQPASISCRSSQ |
| | FTFSSYAMNWVRQAPGKGLECVSGIS | SLVHSDGNTYLNWLQQRPGQPPRLLI |
| | GNGGRIYYAESVKGRFTISRDNSKSTF | YKISNRFSGVPDRFSGSGAGTDFTLKI |
| | YLQMNSLRAEDTAVYYCAKDLDVW | SRVEAEDVGVYYCMQATQFPLTFGG |
| | GKGTTVTVSS | GTKVEIK |
| CB21-498-028 | EMQLVESGGGLVQPGGSLRLSCAASG | DVVMTQTPLSSPVTLGQPASISCRSSQ |
| | FTFSSYAMNWVRQAPGKGLESVSGIS | SLVHSDGNTYLNWLQQRPGQPPRLLI |
| | GNAGRIYYAESVKGRFTISRDNSKSTF | YKISNRFSGVPDRFSGSGAGTDFTLKI |
| | YLQMNSLRAEDTAVYYCAKDLDVW | SRVEAEDVGVYYCMQATQFPLTFGG |
| | GKGTTVTVSS | GTKVEIK |
| CB21-498-029 | EMQLVESGGGLVQPGGSLRLSCAASG | DVVMTQTPLSSPVTLGQSASISCRSSQ |
| | FTFSSYAMNWVRQAPGKGLECVSGIS | SLVHSDGNTYLNWLHQRPGQPPRLLI |
| | GNGGRIYYAESVKGRFTISRDNSKSTF | YRISNRFSGVPDRFSGSGAGTDFTLKI |
| | YLQMNSLRAEDTAVYYCAKDLDVW | SRVEAEDVGVYYCMQATQFPLTFGG |
| | GKGTTVTVSS | GTKLEIK |
| CB21-498-030 | EMQLVESGGGLVQPGGSLRLSCAASG | DVVMTQTPLSSPVTLGQSASISCRSSQ |
| | FTFSSYAMNWVRQAPGKGLECVSGIS | SLVHSDGNTYLNWLHQRPGQPPRLLI |
| | GNGGRIYYAESVKGRFTISRDNSKSTF | YKASNRFSGVPDRFSGSGAGTDFTLK |
| | YLQMNSLRAEDTAVYYCAKDLDVW | ISRVEAEDVGVYYCMQATQFPLTFGG |
| | GKGTTVTVSS | GTKLEIK |
| CB21-498-031 | EMQLVESGGGLVQPGGSLRLSCAASG | DVVMTQTPLSSPVTLGQSASISCRSSQ |
| | FTFSSYAMNWVRQAPGKGLECVSGIS | SLVHSDGNTYLNWLHQRPGQPPRLLI |
| | GNGGRIYYAESVKGRFTISRDNSKSTF | YKNSNRFSGVPDRFSGSGAGTDFTLK |
| | YLQMNSLRAEDTAVYYCAKDLDVW | ISRVEAEDVGVYYCMQATQFPLTFGG |
| | GKGTTVTVSS | GTKLEIK |
| CB21-498-032 | EMQLVESGGGLVQPGGSLRLSCAASG | DVVMTQTPLSSPVTLGQSASISCRSSQ |
| | FTFSSYAMNWVRQAPGKGLECVSGIS | SLVHSDGNTYLNWLHQRPGQPPRLLI |
| | GNGGRIYYAESVKGRFTISRDNSKSTF | YKTSNRFSGVPDRFSGSGAGTDFTLKI |
| | YLQMNSLRAEDTAVYYCAKDLDVW | SRVEAEDVGVYYCMQATQFPLTFGG |
| | GKGTTVTVSS | GTKLEIK |
| CB21-498-033 | EMQLVESGGGLVQPGGSLRLSCAASG | DVVMTQTPLSSPVTLGQSASISCRSSQ |
| | FTFSSYAMNWVRQAPGKGLECVSGIS | SLVHSDGNTYLNWLHQRPGQPPRLLI |
| | GNGGRIYYAESVKGRFTISRDNSKSTF | YKVSNRFSGVPDRFSGSGAGTDFTLK |
| | YLQMNSLRAEDTAVYYCAKDLDVW | ISRVEAEDVGVYYCMQATQFPLTFGG |
| | GKGTTVTVSS | GTKLEIK |
| CB21-498-034 | EMQLVESGGGLVQPGGSLRLSCAASG | DVVMTQTPLSSPVTLGQSASISCRSSQ |
| | FTFSSYAMNWVRQAPGKGLECVSGIS | SLVHSDGNTYLNWLHQRPGQPPRLLI |
| | GNGGRIYYAESVKGRFTISRDNSKSTF | YKISNLFSGVPDRFSGSGAGTDFTLKI |
| | YLQMNSLRAEDTAVYYCAKDLDVW | SRVEAEDVGVYYCMQATQFPLTFGG |
| | GKGTTVTVSS | GTKLEIK |
| CB21-498-035 | EMQLVESGGGLVQPGGSLRLSCAASG | DVVMTQTPLSSPVTLGQSASISCRSSQ |
| | FTFSSYAMNWVRQAPGKGLECVSGIS | SLVHSDGNTYLNWLHQRPGQPPRLLI |
| | GNGGRIYYAESVKGRFTISRDNSKSTF | YKISNDFSGVPDRFSGSGAGTDFTLKI |
| | YLQMNSLRAEDTAVYYCAKDLDVW | SRVEAEDVGVYYCMQATQFPLTFGG |
| | GKGTTVTVSS | GTKLEIK |
| CB21-498-036 | EMQLVESGGGLVQPGGSLRLSCAASG | DVVMTQTPLSSPVTLGQSASISCRSSQ |
| | FTFSSYAMNWVRQAPGKGLECVSGIS | SLVHSDGNTYLNWLHQRPGQPPRLLI |
| | GNGGRIYYAESVKGRFTISRDNSKSTF | YKISNEFSGVPDRFSGSGAGTDFTLKI |
| | YLQMNSLRAEDTAVYYCAKDLDVW | SRVEAEDVGVYYCMQATQFPLTFGG |
| | GKGTTVTVSS | GTKLEIK |
| CB21-498-037 | EMQLVESGGGLVQPGGSLRLSCAASG | DVVMTQTPLSSPVTLGQSASISCRSSQ |
| | FTFSSYAMNWVRQAPGKGLECVSGIS | SLVHSDGNTYLNWLHQRPGQPPRLLI |
| | GNGGRIYYAESVKGRFTISRDNSKSTF | YKISNSFSGVPDRFSGSGAGTDFTLKI |
| | YLQMNSLRAEDTAVYYCAKDLDVW | SRVEAEDVGVYYCMQATQFPLTFGG |
| | GKGTTVTVSS | GTKLEIK |
| CB21-498-038 | EMQLVESGGGLVQPGGSLRLSCAASG | DVVMTQTPLSSPVTLGQSASISCRSSQ |
| | FTFSSYAMNWVRQAPGKGLECVSGIS | SLVHSDGNTYLNWLHQRPGQPPRLLI |
| | GNGGRIYYAESVKGRFTISRDNSKSTF | YKISNPFSGVPDRFSGSGAGTDFTLKI |
| | YLQMNSLRAEDTAVYYCAKDLDVW | SRVEAEDVGVYYCMQATQFPLTFGG |
| | GKGTTVTVSS | GTKLEIK |
| CB21-498-039 | EMQLVESGGGLVQPGGSLRLSCAASG | DVVMTQTPLSSPVTLGQSASISCRSSQ |
| | FTFSSYAMNWVRQAPGKGLECVSGIS | SLVHSDGNTYLNWLHQRPGQPPRLLI |
| | GNGGRIYYAESVKGRFTISRDNSKSTF | YKISNRPSGVPDRFSGSGAGTDFTLKI |
| | YLQMNSLRAEDTAVYYCAKDLDVW | SRVEAEDVGVYYCMQATQFPLTFGG |
| | GKGTTVTVSS | GTKLEIK |
| CB21-498-040 | EMQLVESGGGLVQPGGSLRLSCAASG | DVVMTQTPLSSPVTLGQSASISCRSSQ |
| | FTFSSYAMNWVRQAPGKGLECVSGIS | SLVHSDGNTYLNWLHQRPGQPPRLLI |
| | GNGGRIYYAESVKGRFTISRDNSKSTF | YKISNRASGVPDRFSGSGAGTDFTLKI |
| | YLQMNSLRAEDTAVYYCAKDLDVW | SRVEAEDVGVYYCMQATQFPLTFGG |
| | GKGTTVTVSS | GTKLEIK |
| CB21-498-041 | EMQLVESGGGLVQPGGSLRLSCAASG | DVVMTQTPLSSPVTLGQSASISCRSSQ |
| | FTFSSYAMNWVRQAPGKGLECVSGIS | SLVHSDGNTYLNWLHQRPGQPPRLLI |
| | GNGGRIYYAESVKGRFTISRDNSKSTF | YKISNRGSGVPDRFSGSGAGTDFTLKI |
| | YLQMNSLRAEDTAVYYCAKDLDVW | SRVEAEDVGVYYCMQATQFPLTFGG |
| | GKGTTVTVSS | GTKLEIK |
| CB21-498-042 | EMQLVESGGGLVQPGGSLRLSCAASG | DVVMTQTPLSSPVTLGQSASISCRSSQ |
| | FTFSSYAMNWVRQAPGKGLECVSGIS | SLVHSDGNTYLNWLHQRPGQPPRLLI |
| | GNGGRIYYAESVKGRFTISRDNSKSTF | YKISNRSSGVPDRFSGSGAGTDFTLKI |
| | YLQMNSLRAEDTAVYYCAKDLDVW | SRVEAEDVGVYYCMQATQFPLTFGG |
| | GKGTTVTVSS | GTKLEIK |
| CB21-498-043 | EMQLVESGGGLVQPGGSLRLSCAASG | DVVMTQTPLSSPVTLGQSASISCRSSQ |
| | FTFSSYAMNWVRQAPGKGLECVSGIS | SLVHSDGNTYLNWLHQRPGQPPRLLI |
| | GNGGRIYYAESVKGRFTISRDNSKSTF | YKISNRNSGVPDRFSGSGAGTDFTLKI |
| | YLQMNSLRAEDTAVYYCAKDLDVW | SRVEAEDVGVYYCMQATQFPLTFGG |
| | GKGTTVTVSS | GTKLEIK |
| CB21-498-044 | EMQLVESGGGLVQPGGSLRLSCAASG | DVVMTQTPLSSPVTLGQSASISCRSSQ |
| | FTFSSYAMNWVRQAPGKGLECVSGIS | SLVHSDGNTYLNWLHQRPGQPPRLLI |
| | GNGGRIYYAESVKGRFTISRDNSKSTF | YKISNRQSGVPDRFSGSGAGTDFTLKI |
| | YLQMNSLRAEDTAVYYCAKDLDVW | SRVEAEDVGVYYCMQATQFPLTFGG |
| | GKGTTVTVSS | GTKLEIK |
| CB21-498-045 | EMQLVESGGGLVQPGGSLRLSCAASG | DVVMTQTPLSSPVTLGQSASISCRSSQ |
| | FTFSSYAMNWVRQAPGKGLECVSGIS | SLVHSDGNTYLNWLHQRPGQPPRLLI |
| | GNGGRIYYAESVKGRFTISRDNSKSTF | YKISNRESGVPDRFSGSGAGTDFTLKI |
| | YLQMNSLRAEDTAVYYCAKDLDVW | SRVEAEDVGVYYCMQATQFPLTFGG |
| | GKGTTVTVSS | GTKLEIK |
| CB21-498-046 | EMQLVESGGGLVQPGGSLRLSCAASG | DVVMTQTPLSSPVTLGQSASISCRSSQ |
| | FTFSSYAMNWVRQAPGKGLECVSGIS | SLVHSDGNTYLNWLHQRPGQPPRLLI |
| | GNGGRIYYAESVKGRFTISRDNSKSTF | YKISNRDSGVPDRFSGSGAGTDFTLKI |
| | YLQMNSLRAEDTAVYYCAKDLDVW | SRVEAEDVGVYYCMQATQFPLTFGG |
| | GKGTTVTVSS | GTKLEIK |
| CB21-498-047 | EMQLVESGGGLVQPGGSLRLSCAASG | DVVMTQTPLSSPVTLGQSASISCRSSQ |
| | FTFSSYAMNWVRQAPGKGLECVSGIS | SLVHSDGNTYLNWLHQRPGQPPRLLI |
| | GNGGRIYYAESVKGRFTISRDNSKSTF | YKISNRFPGVPDRFSGSGAGTDFTLKI |
| | YLQMNSLRAEDTAVYYCAKDLDVW | SRVEAEDVGVYYCMQATQFPLTFGG |
| | GKGTTVTVSS | GTKLEIK |
| CB21-498-048 | EMQLVESGGGLVQPGGSLRLSCAASG | DVVMTQTPLSSPVTLGQSASISCRSSQ |
| | FTFSSYAMNWVRQAPGKGLECVSGIS | SLVHSDGNTYLNWLHQRPGQPPRLLI |
| | GNGGRIYYAESVKGRFTISRDNSKSTF | YKISNRFSPVPDRFSGSGAGTDFTLKI |
| | YLQMNSLRAEDTAVYYCAKDLDVW | SRVEAEDVGVYYCMQATQFPLTFGG |
| | GKGTTVTVSS | GTKLEIK |
| CB21-498-049 | EMQLVESGGGLVQPGGSLRLSCAASG | DVVMTQTPLSSPVTLGQSASISCRSSQ |
| | FTFSSYAMNWVRQAPGKGLECVSGIS | SLVHSDGNTYLNWLHQRPGQPPRLLI |
| | GNGGRIYYAESVKGRFTISRDNSKSTF | YKISNRFSGVPDRFSGSGAGTDFTLKI |
| | YLQMNSLRAEDTAVYYCAKDLDVW | SRVEAEDVGVYYCNQATQFPLTFGGG |
| | GKGTTVTVSS | TKLEIK |
| CB21-498-050 | EMQLVESGGGLVQPGGSLRLSCAASG | DVVMTQTPLSSPVTLGQSASISCRSSQ |
| | FTFSSYAMNWVRQAPGKGLECVSGIS | SLVHSDGNTYLNWLHQRPGQPPRLLI |
| | GNGGRIYYAESVKGRFTISRDNSKSTF | YKISNRFSGVPDRFSGSGAGTDFTLKI |
| | YLQMNSLRAEDTAVYYCAKDLDVW | SRVEAEDVGVYYCWQATQFPLTFGG |
| | GKGTTVTVSS | GTKLEIK |
| CB21-498-051 | EMQLVESGGGLVQPGGSLRLSCAASG | DVVMTQTPLSSPVTLGQSASISCRSSQ |
| | FTFSSYAMNWVRQAPGKGLECVSGIS | SLVHSDGNTYLNWLHQRPGQPPRLLI |
| | GNGGRIYYAESVKGRFTISRDNSKSTF | YKISNRFSGVPDRFSGSGAGTDFTLKI |
| | YLQMNSLRAEDTAVYYCAKDLDVW | SRVEAEDVGVYYCMQGTQFPLTFGG |
| | GKGTTVTVSS | GTKLEIK |
| CB21-498-052 | EMQLVESGGGLVQPGGSLRLSCAASG | DVVMTQTPLSSPVTLGQSASISCRSSQ |
| | FTFSSYAMNWVRQAPGKGLECVSGIS | SLVHSDGNTYLNWLHQRPGQPPRLLI |
| | GNGGRIYYAESVKGRFTISRDNSKSTF | YKISNRFSGVPDRFSGSGAGTDFTLKI |
| | YLQMNSLRAEDTAVYYCAKDLDVW | SRVEAEDVGVYYCMQNTQFPLTFGG |
| | GKGTTVTVSS | GTKLEIK |
| CB21-498-053 | EMQLVESGGGLVQPGGSLRLSCAASG | DVVMTQTPLSSPVTLGQSASISCRSSQ |
| | FTFSSYAMNWVRQAPGKGLECVSGIS | SLVHSDGNTYLNWLHQRPGQPPRLLI |
| | GNGGRIYYAESVKGRFTISRDNSKSTF | YKISNRFSGVPDRFSGSGAGTDFTLKI |
| | YLQMNSLRAEDTAVYYCAKDLDVW | SRVEAEDVGVYYCMQATQSPLTFGG |
| | GKGTTVTVSS | GTKLEIK |
| CB21-498-054 | EMQLVESGGGLVQPGGSLRLSCAASG | DVVMTQTPLSSPVTLGQSASISCRSSQ |
| | FTFSSYAMNWVRQAPGKGLECVSGIS | SLVHSDGNTYLNWLHQRPGQPPRLLI |
| | GNGGRIYYAESVKGRFTISRDNSKSTF | YKISNRFSGVPDRFSGSGAGTDFTLKI |
| | YLQMNSLRAEDTAVYYCAKDLDVW | SRVEAEDVGVYYCMQATQTPLTFGG |
| | GKGTTVTVSS | GTKLEIK |
| CB21-498-055 | EMQLVESGGGLVQPGGSLRLSCAASG | DVVMTQTPLSSPVTLGQSASISCRSSQ |
| | FTFSSYAMNWVRQAPGKGLECVSGIS | SLVHSDGNTYLNWLHQRPGQPPRLLI |
| | GNGGRIYYAESVKGRFTISRDNSKSTF | YKISNRFSGVPDRFSGSGAGTDFTLKI |
| | YLQMNSLRAEDTAVYYCAKDLDVW | SRVEAEDVGVYYCMQATQYPLTFGG |
| | GKGTTVTVSS | GTKLEIK |
| CB21-498-056 | EMQLVESGGGLVQPGGSLRLSCAASG | DVVMTQTPLSSPVTLGQSASISCRSSQ |
| | FTFSSYAMNWVRQAPGKGLECVSGIS | SLVHSDGNTYLNWLHQRPGQPPRLLI |
| | GNGGRIYYAESVKGRFTISRDNSKSTF | YKISNRFSGVPDRFSGSGAGTDFTLKI |
| | YLQMNSLRAEDTAVYYCAKDLDVW | SRVEAEDVGVYYCMQATQNPLTFGG |
| | GKGTTVTVSS | GTKLEIK |
| CB21-498-057 | EMQLVESGGGLVQPGGSLRLSCAASG | DVVMTQTPLSSPVTLGQSASISCRSSQ |
| | FTFSSYAMNWVRQAPGKGLECVSGIS | SLVHSDGNTYLNWLHQRPGQPPRLLI |
| | GNGGRIYYAESVKGRFTISRDNSKSTF | YKISNRFSGVPDRFSGSGAGTDFTLKI |
| | YLQMNSLRAEDTAVYYCAKDLDVW | SRVEAEDVGVYYCMQATQLPLTFGG |
| | GKGTTVTVSS | GTKLEIK |
| CB21-498-058 | EMQLVESGGGLVQPGGSLRLSCAASG | DVVMTQTPLSSPVTLGQSASISCRSSQ |
| | FTFSSYAMNWVRQAPGKGLECVSGIS | SLVHSDGNTYLNWLHQRPGQPPRLLI |
| | GNGGRIYYAESVKGRFTISRDNSKSTF | YKISNRFSGVPDRFSGSGAGTDFTLKI |
| | YLQMNSLRAEDTAVYYCAKDLDVW | SRVEAEDVGVYYCMQATQAPLTFGG |
| | GKGTTVTVSS | GTKLEIK |
| CB21-498-059 | EMQLVESGGGLVQPGGSLRLSCAASG | DVVMTQTPLSSPVTLGQSASISCRSSQ |
| | FTFSSYAMNWVRQAPGKGLECVSGIS | SLVHSDGNTYLNWLHQRPGQPPRLLI |
| | GNGGRIYYAESVKGRFTISRDNSKSTF | YKISNRFSGVPDRFSGSGAGTDFTLKI |
| | YLQMNSLRAEDTAVYYCAKDLDVW | SRVEAEDVGVYYCMQATQFNLTFGG |
| | GKGTTVTVSS | GTKLEIK |
| CB21-498-060 | EMQLVESGGGLVQPGGSLRLSCAASG | DVVMTQTPLSSPVTLGQSASISCRSSQ |
| | FTFSSYAMNWVRQAPGKGLECVSGIS | SLVHSDGNTYLNWLHQRPGQPPRLLI |
| | GNGGRIYYAESVKGRFTISRDNSKSTF | YKISNRFSGVPDRFSGSGAGTDFTLKI |
| | YLQMNSLRAEDTAVYYCAKDLDVW | SRVEAEDVGVYYCMQATQFQLTFGG |
| | GKGTTVTVSS | GTKLEIK |
| CB21-498-061 | EMQLVESGGGLVQPGGSLRLSCAASG | DVVMTQTPLSSPVTLGQSASISCRSSQ |
| | FTFSSYAMNWVRQAPGKGLECVSGIS | SLVHSDGNTYLNWLHQRPGQPPRLLI |
| | GNGGRIYYAESVKGRFTISRDNSKSTF | YKISNRFSGVPDRFSGSGAGTDFTLKI |
| | YLQMNSLRAEDTAVYYCAKDLDVW | SRVEAEDVGVYYCMQATQFDLTFGG |
| | GKGTTVTVSS | GTKLEIK |
| CB21-498-062 | EMQLVESGGGLVQPGGSLRLSCAASG | DVVMTQTPLSSPVTLGQSASISCRSSQ |
| | FTFSSYAMNWVRQAPGKGLECVSGIS | SLVHSDGNTYLNWLHQRPGQPPRLLI |
| | GNGGRIYYAESVKGRFTISRDNSKSTF | YKISNRFSGVPDRFSGSGAGTDFTLKI |
| | YLQMNSLRAEDTAVYYCAKDLDVW | SRVEAEDVGVYYCMQATQFSLTFGG |
| | GKGTTVTVSS | GTKLEIK |
| CB21-498-063 | EMQLVESGGGLVQPGGSLRLSCAASG | DVVMTQTPLSSPVTLGQSASISCRSSQ |
| | FTFSSYAMNWVRQAPGKGLECVSGIS | SLVHSDGNTYLNWLHQRPGQPPRLLI |
| | GNGGRIYYAESVKGRFTISRDNSKSTF | YKISNRFSGVPDRFSGSGAGTDFTLKI |
| | YLQMNSLRAEDTAVYYCAKDLDVW | SRVEAEDVGVYYCMQATQFPSTFGG |
| | GKGTTVTVSS | GTKLEIK |
| CB21-498-064 | EMQLVESGGGLVQPGGSLRLSCAASG | DVVMTQTPLSSPVTLGQSASISCRSSQ |
| | FTFSSYAMNWVRQAPGKGLECVSGIS | SLVHSDGNTYLNWLHQRPGQPPRLLI |
| | GNGGRIYYAESVKGRFTISRDNSKSTF | YKISNRFSGVPDRFSGSGAGTDFTLKI |
| | YLQMNSLRAEDTAVYYCAKDLDVW | SRVEAEDVGVYYCMQATQFPGTFGG |
| | GKGTTVTVSS | GTKLEIK |
| CB21-498-065 | EMQLVESGGGLVQPGGSLRLSCAASG | DVVMTQTPLSSPVTLGQSASISCRSSQ |
| | FTFSSYAMNWVRQAPGKGLECVSGIS | SLVHSDGNTYLNWLHQRPGQPPRLLI |
| | GNGGRIYYAESVKGRFTISRDNSKSTF | YKISNRFSGVPDRFSGSGAGTDFTLKI |
| | YLQMNSLRAEDTAVYYCAKDLDVW | SRVEAEDVGVYYCMQATQFPYTFGG |
| | GKGTTVTVSS | GTKLEIK |
| CB21-498-066 | EMQLVESGGGLVQPGGSLRLSCAASG | DVVMTQTPLSSPVTLGQSASISCRSSQ |
| | FTFSSYAMNWVRQAPGKGLECVSGIS | SLVHSDGNTYLNWLHQRPGQPPRLLI |
| | GNGGRIYYAESVKGRFTISRDNSKSTF | YKISNRFSGVPDRFSGSGAGTDFTLKI |
| | YLQMNSLRAEDTAVYYCAKDLDVW | SRVEAEDVGVYYCMQATQFPWTFGG |
| | GKGTTVTVSS | GTKLEIK |
| CB21-498-067 | EMQLVESGGGLVQPGGSLRLSCAASG | DVVMTQTPLSSPVTLGQSASISCRSSQ |
| | FTFSSYAMNWVRQAPGKGLECVSGIS | SLVHSDGNTYLNWLHQRPGQPPRLLI |
| | GNGGRIYYAESVKGRFTISRDNSKSTF | YKISNRFSGVPDRFSGSGAGTDFTLKI |
| | YLQMNSLRAEDTAVYYCAKDLDVW | SRVEAEDVGVYYCMQATQFSLPFGG |
| | GKGTTVTVSS | GTKLEIK |
| CB21-498-068 | EMQLVESGGGLVQPGGSLRLSCAASG | DVVMTQTPLSSPVTLGQPASISCRSSQ |
| | FTFSSYAMNWVRQAPGKGLEGVSGIS | SLVHSDGNTYLNWLQQRPGQPPRLLI |
| | GSGGRIYYAESVKGRFTISRDNSKSTF | YKISNRFSGVPDRFSGSGAGTDFTLKI |
| | YLQMNSLRAEDTAVYYCAKDLDVW | SRVEAEDVGVYYCMQATQFPLTFGG |
| | GKGTTVTVSS | GTKVEIK |
| CB21-498-069 | EVQLVESGGGLVQPGGSLRLSCAASG | DVVMTQTPLSSPVTLGQPASISCRSSQ |
| | FTFSSYAMNWVRQAPGKGLEGVSGIS | SLVHSDGNTYLNWLQQRPGQPPRLLI |
| | GNGGRIYYAESVKGRFTISRDNSKSTF | YKISNRFSGVPDRFSGSGAGTDFTLKI |
| | YLQMNSLRAEDTAVYYCAKDLDVW | SRVEAEDVGVYYCMQATQFPLTFGG |
| | GKGTTVTVSS | GTKVEIK |
| CB21-498-070 | EVQLVESGGGLVQPGGSLRLSCAASG | DVVMTQTPLSSPVTLGQPASISCRSSQ |
| | FTFSSYAMNWVRQAPGKGLEGVSGIS | SLVHSDGNTYLNWLQQRPGQPPRLLI |
| | GSGGRIYYAESVKGRFTISRDNSKSTF | YKISNRFSGVPDRFSGSGAGTDFTLKI |
| | YLQMNSLRAEDTAVYYCAKDLDVW | SRVEAEDVGVYYCMQATQFPLTFGG |
| | GKGTTVTVSS | GTKVEIK |
| CB21-498-071 | EMQLVESGGGLVQPGGSLRLSCAASG | DVVMTQTPLSSPVTLGQPASISCRSSQ |
| | FTFSSYAMNWVRQAPGKGLEGVSGIS | SLVHSDANTYLNWLQQRPGQPPRLLI |
| | GNGGRIYYAESVKGRFTISRDNSKSTF | YKISNRFSGVPDRFSGSGAGTDFTLKI |
| | YLQMNSLRAEDTAVYYCAKDLDVW | SRVEAEDVGVYYCMQATQFPLTFGG |
| | GKGTTVTVSS | GTKVEIK |
| CB21-498-072 | EMQLVESGGGLVQPGGSLRLSCAASG | DVVMTQTPLSSPVTLGQPASISCRSSQ |
| | FTFSSYAMNWVRQAPGKGLEGVSGIS | SLVHSDANTYLNWLQQRPGQPPRLLI |
| | GSGGRIYYAESVKGRFTISRDNSKSTF | YKISNRFSGVPDRFSGSGAGTDFTLKI |
| | YLQMNSLRAEDTAVYYCAKDLDVW | SRVEAEDVGVYYCMQATQFPLTFGG |
| | GKGTTVTVSS | GTKVEIK |
| CB21-498-073 | EVQLVESGGGLVQPGGSLRLSCAASG | DVVMTQTPLSSPVTLGQPASISCRSSQ |
| | FTFSSYAMNWVRQAPGKGLECVSGIS | SLVHSDANTYLNWLQQRPGQPPRLLI |
| | GNGGRIYYAESVKGRFTISRDNSKSTF | YKISNRFSGVPDRFSGSGAGTDFTLKI |
| | YLQMNSLRAEDTAVYYCAKDLDVW | SRVEAEDVGVYYCMQATQFPLTFGG |
| | GKGTTVTVSS | GTKVEIK |
| CB21-498-074 | EVQLVESGGGLVQPGGSLRLSCAASG | DVVMTQTPLSSPVTLGQPASISCRSSQ |
| | FTFSSYAMNWVRQAPGKGLECVSGIS | SLVHSDANTYLNWLQQRPGQPPRLLI |
| | GSGGRIYYAESVKGRFTISRDNSKSTF | YKISNRFSGVPDRFSGSGAGTDFTLKI |
| | YLQMNSLRAEDTAVYYCAKDLDVW | SRVEAEDVGVYYCMQATQFPLTFGG |
| | GKGTTVTVSS | GTKVEIK |
| CB21-498-075 | EVQLVESGGGLVQPGGSLRLSCAASG | DVVMTQTPLSSPVTLGQPASISCRSSQ |
| | FTFSSYAMNWVRQAPGKGLEGVSGIS | SLVHSDANTYLNWLQQRPGQPPRLLI |
| | GNGGRIYYAESVKGRFTISRDNSKSTF | YKISNRFSGVPDRFSGSGAGTDFTLKI |
| | YLQMNSLRAEDTAVYYCAKDLDVW | SRVEAEDVGVYYCMQATQFPLTFGG |
| | GKGTTVTVSS | GTKVEIK |
| CB21-498-076 | EVQLVESGGGLVQPGGSLRLSCAASG | DVVMTQTPLSSPVTLGQPASISCRSSQ |
| | FTFSSYAMNWVRQAPGKGLEGVSGIS | SLVHSDANTYLNWLQQRPGQPPRLLI |
| | GSGGRIYYAESVKGRFTISRDNSKSTF | YKISNRFSGVPDRFSGSGAGTDFTLKI |
| | YLQMNSLRAEDTAVYYCAKDLDVW | SRVEAEDVGVYYCMQATQFPLTFGG |
| | GKGTTVTVSS | GTKVEIK |
| CB21-498-077 | EMQLVESGGGLVQPGGSLRLSCAASG | DVVMTQTPLSSPVTLGQPASISCRSSQ |
| | FTFSSYAMNWVRQAPGKGLECVSGIS | SLVHSDANTYLNWLQQRPGQPPRLLI |
| | GNGGRIYYAESVKGRFTISRDNSKSTF | YKISNRFSGVPDRFSGSGSGTDFTLKI |
| | YLQMNSLRAEDTAVYYCAKDLDVW | SRVEAEDVGVYYCMQATQFPLTFGG |
| | GKGTTVTVSS | GTKVEIK |
| CB21-498-078 | EMQLVESGGGLVQPGGSLRLSCAASG | DVVMTQTPLSSPVTLGQPASISCRSSQ |
| | FTFSSYAMNWVRQAPGKGLEGVSGIS | SLVHSDANTYLNWLQQRPGQPPRLLI |
| | GNGGRIYYAESVKGRFTISRDNSKSTF | YKISNRFSGVPDRFSGSGSGTDFTLKI |
| | YLQMNSLRAEDTAVYYCAKDLDVW | SRVEAEDVGVYYCMQATQFPLTFGG |
| | GKGTTVTVSS | GTKVEIK |
| CB21-498-079 | EMQLVESGGGLVQPGGSLRLSCAASG | DVVMTQTPLSSPVTLGQPASISCRSSQ |
| | FTFSSYAMNWVRQAPGKGLEGVSGIS | SLVHSDANTYLNWLQQRPGQPPRLLI |
| | GSGGRIYYAESVKGRFTISRDNSKSTF | YKISNRFSGVPDRFSGSGSGTDFTLKI |
| | YLQMNSLRAEDTAVYYCAKDLDVW | SRVEAEDVGVYYCMQATQFPLTFGG |
| | GKGTTVTVSS | GTKVEIK |
| CB21-498-080 | EVQLVESGGGLVQPGGSLRLSCAASG | DVVMTQTPLSSPVTLGQPASISCRSSQ |
| | FTFSSYAMNWVRQAPGKGLECVSGIS | SLVHSDANTYLNWLQQRPGQPPRLLI |
| | GNGGRIYYAESVKGRFTISRDNSKSTF | YKISNRFSGVPDRFSGSGSGTDFTLKI |
| | YLQMNSLRAEDTAVYYCAKDLDVW | SRVEAEDVGVYYCMQATQFPLTFGG |
| | GKGTTVTVSS | GTKVEIK |
| CB21-498-081 | EVQLVESGGGLVQPGGSLRLSCAASG | DVVMTQTPLSSPVTLGQPASISCRSSQ |
| | FTFSSYAMNWVRQAPGKGLECVSGIS | SLVHSDANTYLNWLQQRPGQPPRLLI |
| | GSGGRIYYAESVKGRFTISRDNSKSTF | YKISNRFSGVPDRFSGSGSGTDFTLKI |
| | YLQMNSLRAEDTAVYYCAKDLDVW | SRVEAEDVGVYYCMQATQFPLTFGG |
| | GKGTTVTVSS | GTKVEIK |
| CB21-498-082 | EVQLVESGGGLVQPGGSLRLSCAASG | DVVMTQTPLSSPVTLGQPASISCRSSQ |
| | FTFSSYAMNWVRQAPGKGLEGVSGIS | SLVHSDANTYLNWLQQRPGQPPRLLI |
| | GNGGRIYYAESVKGRFTISRDNSKSTF | YKISNRFSGVPDRFSGSGSGTDFTLKI |
| | YLQMNSLRAEDTAVYYCAKDLDVW | SRVEAEDVGVYYCMQATQFPLTFGG |
| | GKGTTVTVSS | GTKVEIK |
| CB21-498-083 | EVQLVESGGGLVQPGGSLRLSCAASG | DVVMTQTPLSSPVTLGQPASISCRSSQ |
| | FTFSSYAMNWVRQAPGKGLEGVSGIS | SLVHSDANTYLNWLQQRPGQPPRLLI |
| | GSGGRIYYAESVKGRFTISRDNSKSTF | YKISNRFSGVPDRFSGSGSGTDFTLKI |
| | YLQMNSLRAEDTAVYYCAKDLDVW | SRVEAEDVGVYYCMQATQFPLTFGG |
| | GKGTTVTVSS | GTKVEIK |
| CB21-498-084 | EMQLVESGGGLVQPGGSLRLSCAASG | DVVMTQTPLSSPVTLGQSASISCRSSQ |
| | FTFSSYAMNWVRQAPGKGLECVSGIS | SLVHSDANTYLNWLHQRPGQPPRLLI |
| | GNGGRIYYAESVKGRFTISRDNSKSTF | YKISNRFSGVPDRFSGSGSGTDFTLKI |
| | YLQMNSLRAEDTAVYYCAKDLDVW | SRVEAEDVGVYYCMQATQFPLTFGG |
| | GKGTTVTVSS | GTKLEIK |
| CB21-498-085 | EMQLVESGGGLVQPGGSLRLSCAASG | DVVMTQTPLSSPVTLGQSASISCRSSQ |
| | FTFSSYAMNWVRQAPGKGLEGVSGIS | SLVHSDANTYLNWLHQRPGQPPRLLI |
| | GNGGRIYYAESVKGRFTISRDNSKSTF | YKISNRFSGVPDRFSGSGSGTDFTLKI |
| | YLQMNSLRAEDTAVYYCAKDLDVW | SRVEAEDVGVYYCMQATQFPLTFGG |
| | GKGTTVTVSS | GTKLEIK |
| CB21-498-086 | EMQLVESGGGLVQPGGSLRLSCAASG | DVVMTQTPLSSPVTLGQSASISCRSSQ |
| | FTFSSYAMNWVRQAPGKGLEGVSGIS | SLVHSDANTYLNWLHQRPGQPPRLLI |
| | GSGGRIYYAESVKGRFTISRDNSKSTF | YKISNRFSGVPDRFSGSGSGTDFTLKI |
| | YLQMNSLRAEDTAVYYCAKDLDVW | SRVEAEDVGVYYCMQATQFPLTFGG |
| | GKGTTVTVSS | GTKLEIK |
| CB21-498-087 | EVQLVESGGGLVQPGGSLRLSCAASG | DVVMTQTPLSSPVTLGQSASISCRSSQ |
| | FTFSSYAMNWVRQAPGKGLECVSGIS | SLVHSDANTYLNWLHQRPGQPPRLLI |
| | GNGGRIYYAESVKGRFTISRDNSKSTF | YKISNRFSGVPDRFSGSGSGTDFTLKI |
| | YLQMNSLRAEDTAVYYCAKDLDVW | SRVEAEDVGVYYCMQATQFPLTFGG |
| | GKGTTVTVSS | GTKLEIK |
| CB21-498-088 | EVQLVESGGGLVQPGGSLRLSCAASG | DVVMTQTPLSSPVTLGQSASISCRSSQ |
| | FTFSSYAMNWVRQAPGKGLECVSGIS | SLVHSDANTYLNWLHQRPGQPPRLLI |
| | GSGGRIYYAESVKGRFTISRDNSKSTF | YKISNRFSGVPDRFSGSGSGTDFTLKI |
| | YLQMNSLRAEDTAVYYCAKDLDVW | SRVEAEDVGVYYCMQATQFPLTFGG |
| | GKGTTVTVSS | GTKLEIK |
| CB21-498-089 | EVQLVESGGGLVQPGGSLRLSCAASG | DVVMTQTPLSSPVTLGQSASISCRSSQ |
| | FTFSSYAMNWVRQAPGKGLEGVSGIS | SLVHSDANTYLNWLHQRPGQPPRLLI |
| | GNGGRIYYAESVKGRFTISRDNSKSTF | YKISNRFSGVPDRFSGSGSGTDFTLKI |
| | YLQMNSLRAEDTAVYYCAKDLDVW | SRVEAEDVGVYYCMQATQFPLTFGG |
| | GKGTTVTVSS | GTKLEIK |
| CB21-498-090 | EVQLVESGGGLVQPGGSLRLSCAASG | DVVMTQTPLSSPVTLGQSASISCRSSQ |
| | FTFSSYAMNWVRQAPGKGLEGVSGIS | SLVHSDANTYLNWLHQRPGQPPRLLI |
| | GSGGRIYYAESVKGRFTISRDNSKSTF | YKISNRFSGVPDRFSGSGSGTDFTLKI |
| | YLQMNSLRAEDTAVYYCAKDLDVW | SRVEAEDVGVYYCMQATQFPLTFGG |
| | GKGTTVTVSS | GTKLEIK |
| CB21-498-091 | EVQLVESGGGLVQPGGSLRLSCAASG | DVVMTQTPLSSPVTLGQPASISCRSSQ |
| | FTFSSYAMSWVRQAPGKGLEGVSGIS | SLVHSDGNTYLNWLQQRPGQPPRLLI |
| | GSGGRIYYAESVKGRFTISRDNSKSTF | YKISNRFSGVPDRFSGSGAGTDFTLKI |
| | YLQMNSLRAEDTAVYYCAKDLDVW | SRVEAEDVGVYYCMQATQFPLTFGG |
| | GKGTTVTVSS | GTKVEIK |
| CB21-498-092 | EVQLVESGGGLVQPGGSLRLSCAASG | DVVMTQTPLSSPVTLGQPASISCRSSQ |
| | FTFSSYAMHWVRQAPGKGLEGVSGIS | SLVHSDGNTYLNWLQQRPGQPPRLLI |
| | GSGGRIYYAESVKGRFTISRDNSKSTF | YKISNRFSGVPDRFSGSGAGTDFTLKI |
| | YLQMNSLRAEDTAVYYCAKDLDVW | SRVEAEDVGVYYCMQATQFPLTFGG |
| | GKGTTVTVSS | GTKVEIK |
| CB21-498-093 | EVQLVESGGGLVQPGGSLRLSCAASG | DVVMTQTPLSSPVTLGQPASISCRSSQ |
| | FTFSSYAMTWVRQAPGKGLEGVSGIS | SLVHSDGNTYLNWLQQRPGQPPRLLI |
| | GSGGRIYYAESVKGRFTISRDNSKSTF | YKISNRFSGVPDRFSGSGAGTDFTLKI |
| | YLQMNSLRAEDTAVYYCAKDLDVW | SRVEAEDVGVYYCMQATQFPLTFGG |
| | GKGTTVTVSS | GTKVEIK |
| CB21-498-094 | EVQLVESGGGLVQPGGSLRLSCAASG | DVVMTQTPLSSPVTLGQPASISCRSSQ |
| | FTFSSYAMNWVRQAPGRGLEGVSGIS | SLVHSDGNTYLNWLQQRPGQPPRLLI |
| | GSGGRIYYAESVKGRFTISRDNSKSTF | YKISNRFSGVPDRFSGSGAGTDFTLKI |
| | YLQMNSLRAEDTAVYYCAKDLDVW | SRVEAEDVGVYYCMQATQFPLTFGG |
| | GKGTTVTVSS | GTKVEIK |
| CB21-498-095 | EVQLVESGGGLVQPGGSLRLSCAASG | DVVMTQTPLSSPVTLGQPASISCRSSQ |
| | FTFSSYAMNWVRQAPGQGLEGVSGIS | SLVHSDGNTYLNWLQQRPGQPPRLLI |
| | GSGGRIYYAESVKGRFTISRDNSKSTF | YKISNRFSGVPDRFSGSGAGTDFTLKI |
| | YLQMNSLRAEDTAVYYCAKDLDVW | SRVEAEDVGVYYCMQATQFPLTFGG |
| | GKGTTVTVSS | GTKVEIK |
| CB21-498-096 | EVQLVESGGGLVQPGGSLRLSCAASG | DVVMTQTPLSSPVTLGQPASISCRSSQ |
| | FTFSSYAMNWVRQAPGEGLEGVSGIS | SLVHSDGNTYLNWLQQRPGQPPRLLI |
| | GSGGRIYYAESVKGRFTISRDNSKSTF | YKISNRFSGVPDRFSGSGAGTDFTLKI |
| | YLQMNSLRAEDTAVYYCAKDLDVW | SRVEAEDVGVYYCMQATQFPLTFGG |
| | GKGTTVTVSS | GTKVEIK |
| CB21-498-097 | EVQLVESGGGLVQPGGSLRLSCAASG | DVVMTQTPLSSPVTLGQPASISCRSSQ |
| | FTFSSYAMNWVRQAPGKGLEGVSGIS | SLVHSDGNTYLNWLQQRPGQPPRLLI |
| | GSGGRIYKAESVKGRFDISRDNSKSTF | YKISNRFSGVPDRFSGSGAGTDFTLKI |
| | YLQMNSLRAEDTAVYYCAKDLDVW | SRVEAEDVGVYYCMQATQFPLTFGG |
| | GKGTTVTVSS | GTKVEIK |
| CB21-498-098 | EVQLVESGGGLVQPGGSLRLSCAASG | DVVMTQTPLSSPVTLGQPASISCRSSQ |
| | FTFSSYAMNWVRQAPGKGLEGVSGIS | SLVHSDGNTYLNWLQQRPGQPPRLLI |
| | GSGGRIYYAESVKGRFMISRDNSKSTF | YKISNRFSGVPDRFSGSGAGTDFTLKI |
| | YLQMNSLRAEDTAVYYCAKDLDVW | SRVEAEDVGVYYCMQATQFPLTFGG |
| | GKGTTVTVSS | GTKVEIK |
| CB21-498-099 | EVQLVESGGGLVQPGGSLRLSCAASG | DVVMTQTPLSSPVTLGQPASISCRSSQ |
| | FTFSSYAMNWVRQAPGKGLEGVSGIS | SLVHSDGNTYLNWLQQRPGQPPRLLI |
| | GSGGRIYYAESVKGRFQISRDNSKSTF | YKISNRFSGVPDRFSGSGAGTDFTLKI |
| | YLQMNSLRAEDTAVYYCAKDLDVW | SRVEAEDVGVYYCMQATQFPLTFGG |
| | GKGTTVTVSS | GTKVEIK |
| CB21-498-100 | EVQLVESGGGLVQPGGSLRLSCAASG | DVVMTQTPLSSPVTLGQPASISCRSSQ |
| | FTFSSYAMNWVRQAPGKGLEGVSGIS | SLVHSDGNTYLNWLQQRPGQPPRLLI |
| | GSGGRIYYAESVKGRFTILRDNSKSTF | YKISNRFSGVPDRFSGSGAGTDFTLKI |
| | YLQMNSLRAEDTAVYYCAKDLDVW | SRVEAEDVGVYYCMQATQFPLTFGG |
| | GKGTTVTVSS | GTKVEIK |
| CB21-498-101 | EVQLVESGGGLVQPGGSLRLSCAASG | DVVMTQTPLSSPVTLGQPASISCRSSQ |
| | FTFSSYAMNWVRQAPGKGLEGVSGIS | SLVHSDGNTYLNWLQQRPGQPPRLLI |
| | GSGGRIYYAESVKGRFTIQRDNSKSTF | YKISNRFSGVPDRFSGSGAGTDFTLKI |
| | YLQMNSLRAEDTAVYYCAKDLDVW | SRVEAEDVGVYYCMQATQFPLTFGG |
| | GKGTTVTVSS | GTKVEIK |
| CB21-498-102 | EVQLVESGGGLVQPGGSLRLSCAASG | DVVMTQTPLSSPVTLGQPASISCRSSQ |
| | FTFSSYAMNWVRQAPGKGLEGVSGIS | SLVHSDGNTYLNWLQQRPGQPPRLLI |
| | GSGGRIYYAESVKGRFTINRDNSKSTF | YKISNRFSGVPDRFSGSGAGTDFTLKI |
| | YLQMNSLRAEDTAVYYCAKDLDVW | SRVEAEDVGVYYCMQATQFPLTFGG |
| | GKGTTVTVSS | GTKVEIK |
| CB21-498-103 | EVQLVESGGGLVQPGGSLRLSCAASG | DVVMTQTPLSSPVTLGQPASISCRSSQ |
| | FTFSSYAMNWVRQAPGKGLEGVSGIS | SLVHSDGNTYLNWLQQRPGQPPRLLI |
| | GSGGRIYYAESVKGRFTISRDNSKSTF | YKISNRFSGVPDRFSGSGAGTDFTLKI |
| | YLQMNELRAEDTAVYYCAKDLDVW | SRVEAEDVGVYYCMQATQFPLTFGG |
| | GKGTTVTVSS | GTKVEIK |
| CB21-498-104 | EVQLVESGGGLVQPGGSLRLSCAASG | DVVMTQTPLSSPVTLGQPASISCRSSQ |
| | FTFSSYAMNWVRQAPGKGLEGVSGIS | SLVHSDGNTYLNWLQQRPGQPPRLLI |
| | GSGGRIYYAESVKGRFTISRDNSKSTF | YKISNRFSGVPDRFSGSGAGTDFTLKI |
| | YLQMNRLRAEDTAVYYCAKDLDVW | SRVEAEDVGVYYCMQATQFPLTFGG |
| | GKGTTVTVSS | GTKVEIK |
| CB21-498-105 | EVQLVESGGGLVQPGGSLRLSCAASG | DVVMTQTPLSSPVTLGQPASISCRSSQ |
| | FTFSSYAMNWVRQAPGKGLEGVSGIS | SLVHSDGNTYLNWLQQRPGQPPRLLI |
| | GSGGRIYYAESVKGRFTISRDNSKSTF | YKISNRFSGVPDRFSGSGAGTDFTLKI |
| | YLQMNTLRAEDTAVYYCAKDLDVW | SRVEAEDVGVYYCMQATQFPLTFGG |
| | GKGTTVTVSS | GTKVEIK |
| CB21-498-106 | EVQLVESGGGLVQPGGSLRLSCAASG | DVVMTQTPLSSPVTLGQPASISCRSSQ |
| | FTFSDYAMNWVRQAPGKGLEGVSGIS | SLVHSDGNTYLNWLQQRPGQPPRLLI |
| | GSGGRIYYAESVKGRFTISRDNSKSTF | YKISNRFSGVPDRFSGSGAGTDFTLKI |
| | YLQMNSLRAEDTAVYYCAKDLDVW | SRVEAEDVGVYYCMQATQFPLTFGG |
| | GKGTTVTVSS | GTKVEIK |
| CB21-498-107 | EVQLVESGGGLVQPGGSLRLSCAASG | DVVMTQTPLSSPVTLGQPASISCRSSQ |
| | FTFSSYAMNWVRQAPGKGLEGVSGIS | SLVHSDGNTYLNWLQQRPGQPPRLLI |
| | GSGGAIYYAESVKGRFTISRDNSKSTF | YKISNRFSGVPDRFSGSGAGTDFTLKI |
| | YLQMNSLRAEDTAVYYCAKDLDVW | SRVEAEDVGVYYCMQATQFPLTFGG |
| | GKGTTVTVSS | GTKVEIK |
| CB21-498-108 | EVQLVESGGGLVQPGGSLRLSCAASG | DVVMTQTPLSSPVTLGQPASISCRSSQ |
| | FTFSSYAMNWVRQAPGKGLEGVSGIS | SLVHSDGNTYLNWLQQRPGQPPRLLI |
| | GSGGRAYYAESVKGRFTISRDNSKSTF | YKISNRFSGVPDRFSGSGAGTDFTLKI |
| | YLQMNSLRAEDTAVYYCAKDLDVW | SRVEAEDVGVYYCMQATQFPLTFGG |
| | GKGTTVTVSS | GTKVEIK |
| CB21-498-109 | EVQLVESGGGLVQPGGSLRLSCAASG | DVVMTQTPLSSPVTLGQPASISCRSSQ |
| | FTFSSYAMNWVRQAPGKGLEGVSGIS | SLVHSDGNTYLNWLQQRPGQPPRLLI |
| | GSGGSTYYAESVKGRFTISRDNSKSTF | YKISNRFSGVPDRFSGSGAGTDFTLKI |
| | YLQMNSLRAEDTAVYYCAKDLDVW | SRVEAEDVGVYYCMQATQFPLTFGG |
| | GKGTTVTVSS | GTKVEIK |
| CB21-498-110 | EVQLVESGGGLVQPGGSLRLSCAASG | DVVMTQTPLSSPVTLGQPASISCRSSQ |
| | FTFSSYAMNWVRQAPGKGLEGVSGIS | SLVHSDGNTYLNWLQQRPGQPPRLLI |
| | GSGGRIFYAESVKGRFTISRDNSKSTF | YKISNRFSGVPDRFSGSGAGTDFTLKI |
| | YLQMNSLRAEDTAVYYCAKDLDVW | SRVEAEDVGVYYCMQATQFPLTFGG |
| | GKGTTVTVSS | GTKVEIK |
| CB21-498-111 | EVQLVESGGGLVQPGGSLRLSCAASG | DVVMTQTPLSSPVTLGQPASISCRSSQ |
| | FTFSSYAMNWVRQAPGKGLEGVSGIS | SLVHSDGNTYLNWLQQRPGQPPRLLI |
| | GSGGRIHYAESVKGRFTISRDNSKSTF | YKISNRFSGVPDRFSGSGAGTDFTLKI |
| | YLQMNSLRAEDTAVYYCAKDLDVW | SRVEAEDVGVYYCMQATQFPLTFGG |
| | GKGTTVTVSS | GTKVEIK |
| CB21-498-112 | EVQLVESGGGLVQPGGSLRLSCAASG | DVVMTQTPLSSPVTLGQPASISCRSSQ |
| | FTFSSYAMNWVRQAPGKGLEGVSGIS | SLVHSDGNTYLNWLQQRPGQPPRLLI |
| | GSGGRINYAESVKGRFTISRDNSKSTF | YKISNRFSGVPDRFSGSGAGTDFTLKI |
| | YLQMNSLRAEDTAVYYCAKDLDVW | SRVEAEDVGVYYCMQATQFPLTFGG |
| | GKGTTVTVSS | GTKVEIK |
| CB21-498-113 | EVQLVESGGGLVQPGGSLRLSCAASG | DVVMTQTPLSSPVTLGQPASISCRSSQ |
| | FTFSSYAMNWVRQAPGKGLEGVSGIS | SLVHSDGNTYLNWLQQRPGQPPRLLI |
| | GSGGRIKYAESVKGRFTISRDNSKSTF | YKISNRFSGVPDRFSGSGAGTDFTLKI |
| | YLQMNSLRAEDTAVYYCAKDLDVW | SRVEAEDVGVYYCMQATQFPLTFGG |
| | GKGTTVTVSS | GTKVEIK |
| CB21-498-114 | EVQLVESGGGLVQPGGSLRLSCAASG | DVVMTQTPLSSPVTLGQPASISCRSSQ |
| | FTFSSYAMNWVRQAPGKGLEGVSGIS | SLVHSDGNTYLNWLQQRPGQPPRLLI |
| | GSGGRIDYAESVKGRFTISRDNSKSTF | YKISNRFSGVPDRFSGSGAGTDFTLKI |
| | YLQMNSLRAEDTAVYYCAKDLDVW | SRVEAEDVGVYYCMQATQFPLTFGG |
| | GKGTTVTVSS | GTKVEIK |
| CB21-498-115 | EVQLVESGGGLVQPGGSLRLSCAASG | DVVMTQTPLSSPVTLGQPASISCRSSQ |
| | FTFSSYAMNWVRQAPGKGLEGVSGIS | SLVHSDGNTYLNWLQQRPGQPPRLLI |
| | GSGGRIAYAESVKGRFTISRDNSKSTF | YKISNRFSGVPDRFSGSGAGTDFTLKI |
| | YLQMNSLRAEDTAVYYCAKDLDVW | SRVEAEDVGVYYCMQATQFPLTFGG |
| | GKGTTVTVSS | GTKVEIK |
| CB21-498-116 | EVQLVESGGGLVQPGGSLRLSCAASG | DVVMTQTPLSSPVTLGQPASISCRSSQ |
| | FTFSSYAMNWVRQAPGKGLEGVSGIS | SLVHSDGNTYLNWLQQRPGQPPRLLI |
| | GSGGRIYFAESVKGRFTISRDNSKSTF | YKISNRFSGVPDRFSGSGAGTDFTLKI |
| | YLQMNSLRAEDTAVYYCAKDLDVW | SRVEAEDVGVYYCMQATQFPLTFGG |
| | GKGTTVTVSS | GTKVEIK |
| CB21-498-117 | EVQLVESGGGLVQPGGSLRLSCAASG | DVVMTQTPLSSPVTLGQPASISCRSSQ |
| | FTFSSYAMNWVRQAPGKGLEGVSGIS | SLVHSDGNTYLNWLQQRPGQPPRLLI |
| | GSGGRIYHAESVKGRFTISRDNSKSTF | YKISNRFSGVPDRFSGSGAGTDFTLKI |
| | YLQMNSLRAEDTAVYYCAKDLDVW | SRVEAEDVGVYYCMQATQFPLTFGG |
| | GKGTTVTVSS | GTKVEIK |
| CB21-498-118 | EVQLVESGGGLVQPGGSLRLSCAASG | DVVMTQTPLSSPVTLGQPASISCRSSQ |
| | FTFSSYAMNWVRQAPGKGLEGVSGIS | SLVHSDGNTYLNWLQQRPGQPPRLLI |
| | GSGGRIYPAESVKGRFTISRDNSKSTF | YKISNRFSGVPDRFSGSGAGTDFTLKI |
| | YLQMNSLRAEDTAVYYCAKDLDVW | SRVEAEDVGVYYCMQATQFPLTFGG |
| | GKGTTVTVSS | GTKVEIK |
| CB21-498-119 | EVQLVESGGGLVQPGGSLRLSCAASG | DVVMTQTPLSSPVTLGQPASISCRSSQ |
| | FTFSSYAMNWVRQAPGKGLEGVSGIS | SLVHSDGNTYLNWLQQRPGQPPRLLI |
| | GSGGRIYAAESVKGRFTISRDNSKSTF | YKISNRFSGVPDRFSGSGAGTDFTLKI |
| | YLQMNSLRAEDTAVYYCAKDLDVW | SRVEAEDVGVYYCMQATQFPLTFGG |
| | GKGTTVTVSS | GTKVEIK |
| CB21-498-120 | EVQLVESGGGLVQPGGSLKLSCVASG | DVVMTQTPLSSPVTLGQPASISCRSSQ |
| | FTFSSYAMNWVRQAPGKGLEGVSGIS | SLVHSDGNTYLNWLQQRPGQPPRLLI |
| | GSGGRIYYAESVKGRFTISRDNSKSTF | YKISNRFSGVPDRFSGSGAGTDFTLKI |
| | YLQMNSLRAEDTAVYYCAKDLDVW | SRVEAEDVGVYYCMQATQFPLTFGG |
| | GKGTTVTVSS | GTKVEIK |
| CB21-498-121 | EVQLVESGGGLVQPGGSLKLSCVASG | DVVMTQTPLSSPVTLGQPASISCRSSQ |
| | FTFSSYAMNWVRQAPGKGLEGVCGIS | SLVHSDGNTYLNWLQQRPGQPPRLLI |
| | GSGGRIYYAESVKGRFTCSRDNSKSTF | YKISNRFSGVPDRFSGSGAGTDFTLKI |
| | YLQMNSLRAEDTAVYYCAKDLDVW | SRVEAEDVGVYYCMQATQFPLTFGG |
| | GKGTTVTVSS | GTKVEIK |
| CB21-498-122 | EVQLVESGGGLVQPGGSLKLSCVASG | DVVMTQTPLSSPVTLGQPASISCRSSQ |
| | FTFSSYAMNWVRQAPGKGLEGVCGIS | SLVHSDGNTYLNWLQQRPGQPPRLLI |
| | GSGGRIYSAESVKGRFTCSRDNSKSTF | YKISNRFSGVPDRFSGSGAGTDFTLKI |
| | YLQMNSLRAEDTAVYYCAKDLDVW | SRVEAEDVGVYYCMQATQFPLTFGG |
| | GKGTTVTVSS | GTKVEIK |
| CB21-498-123 | EMQLVESGGGLVQPGGSLRLSCAASG | DVVMTQTPLSSPVTLGQSASISCRSSQ |
| | FTFSSYAMNWVRQAPGKGLEGVSGIS | SLVHSDGNTYLNWLHQRPGQPPRLLI |
| | GNGGRIYYAESVKGRFTISRDNSKSTF | YKISNRFDGVPDRFSGSGAGTDFTLKI |
| | YLQMNSLRAEDTAVYYCAKDLDVW | SRVEAEDVGVYYCMQATQFPLTFGG |
| | GKGTTVTVSS | GTKLEIK |
| CB21-498-124 | EMQLVESGGGLVQPGGSLRLSCAASG | DVVMTQTPLSSPVTLGQSASISCRSSQ |
| | FTFSSYAMNWVRQAPGKGLEGVSGIS | SLVHSDGNTYLNWLHQRPGQPPRLLI |
| | GNGGRIYYAESVKGRFTISRDNSKSTF | YKISNRFEGVPDRFSGSGAGTDFTLKI |
| | YLQMNSLRAEDTAVYYCAKDLDVW | SRVEAEDVGVYYCMQATQFPLTFGG |
| | GKGTTVTVSS | GTKLEIK |
| CB21-498-125 | EMQLVESGGGLVQPGGSLRLSCAASG | DVVMTQTPLSSPVTLGQSASISCRSSQ |
| | FTFSSYAMNWVRQAPGKGLEGVSGIS | SLVHSDGNTYLNWLHQRPGQPPRLLI |
| | GNGGRIYYAESVKGRFTISRDNSKSTF | YKISNRFQGVPDRFSGSGAGTDFTLKI |
| | YLQMNSLRAEDTAVYYCAKDLDVW | SRVEAEDVGVYYCMQATQFPLTFGG |
| | GKGTTVTVSS | GTKLEIK |
| CB21-498-126 | EMQLVESGGGLVQPGGSLRLSCAASG | DVVMTQTPLSSPVTLGQSASISCRSSQ |
| | FTFSSYAMNWVRQAPGKGLEGVSGIS | SLVHSDGNTYLNWLHQRPGQPPRLLI |
| | GNGGRIYYAESVKGRFTISRDNSKSTF | YKISNRFSGVPDRFTGSGAGTDFTLKI |
| | YLQMNSLRAEDTAVYYCAKDLDVW | SRVEAEDVGVYYCMQATQFPLTFGG |
| | GKGTTVTVSS | GTKLEIK |
| CB21-498-127 | EMQLVESGGGLVQPGGSLRLSCAASG | DVVMTQTPLSSPVTLGQSASISCRSSQ |
| | FTFSSYAMNWVRQAPGKGLEGVSGIS | SLVHSDGNTYLNWLHQRPGQPPRLLI |
| | GNGGRIYYAESVKGRFTISRDNSKSTF | YKISNRFSGVPDRFQGSGAGTDFTLKI |
| | YLQMNSLRAEDTAVYYCAKDLDVW | SRVEAEDVGVYYCMQATQFPLTFGG |
| | GKGTTVTVSS | GTKLEIK |
| CB21-498-128 | EMQLVESGGGLVQPGGSLRLSCAASG | DVVMTQTPLSSPVTLGQSASISCRSSQ |
| | FTFSSYAMNWVRQAPGKGLEGVSGIS | SLVHSDGNTYLNWLHQRPGQPPRLLI |
| | GNGGRIYYAESVKGRFTISRDNSKSTF | YKISNRFSGVPDRFGGSGAGTDFTLKI |
| | YLQMNSLRAEDTAVYYCAKDLDVW | SRVEAEDVGVYYCMQATQFPLTFGG |
| | GKGTTVTVSS | GTKLEIK |
| CB21-498-129 | EMQLVESGGGLVQPGGSLRLSCAASG | DVVMTQTPLSSPVTLGQSASISCRSSQ |
| | FTFSSYAMNWVRQAPGKGLEGVSGIS | SLVHSDGNTYLNWLHQRPGQPPRLLI |
| | GNGGRIYYAESVKGRFTISRDNSKSTF | YKISNRFSGVPDRFSGSGAGTDFTLTI |
| | YLQMNSLRAEDTAVYYCAKDLDVW | SRVEAEDVGVYYCMQATQFPLTFGG |
| | GKGTTVTVSS | GTKLEIK |
| CB21-498-130 | EMQLVESGGGLVQPGGSLRLSCAASG | DVVMTQTPLSSPVTLGQSASISCRSSQ |
| | FTFSSYAMNWVRQAPGKGLEGVSGIS | SLVHSDGNTYLNWLHQRPGQPPRLLI |
| | GNGGRIYYAESVKGRFTISRDNSKSTF | YKISNRFSGVPDRFSGSGAGTDFTLRI |
| | YLQMNSLRAEDTAVYYCAKDLDVW | SRVEAEDVGVYYCMQATQFPLTFGG |
| | GKGTTVTVSS | GTKLEIK |
| CB21-498-131 | EMQLVESGGGLVQPGGSLRLSCAASG | DVVMTQTPLSSPVTLGQSASISCRSSQ |
| | FTFSSYAMNWVRQAPGKGLEGVSGIS | SLVHSDGNTYLNWLHQRPGQPPRLLI |
| | GNGGRIYYAESVKGRFTISRDNSKSTF | YKISNRFSGVPDRFSGSGAGTDFTLEI |
| | YLQMNSLRAEDTAVYYCAKDLDVW | SRVEAEDVGVYYCMQATQFPLTFGG |
| | GKGTTVTVSS | GTKLEIK |
| CB21-498-132 | EMQLVESGGGLVQPGGSLRLSCAASG | DVVMTQTPLSSPVTLGQSASISCRSSQ |
| | FTFSSYAMNWVRQAPGKGLEGVSGIS | SLVHSDGNTYLNWLHQRPGQPPRLLI |
| | GNGGRIYYAESVKGRFTISRDNSKSTF | YKIDNRFSGVPDRFSGSGAGTDFTLKI |
| | YLQMNSLRAEDTAVYYCAKDLDVW | SRVEAEDVGVYYCMQATQFPLTFGG |
| | GKGTTVTVSS | GTKLEIK |
| CB21-498-133 | EMQLVESGGGLVQPGGSLRLSCAASG | DVVMTQTPLSSAVLLGQSASISCRSSQ |
| | FTFSSYAMNWVRQAPGKGLEGVSGIS | SLVHSDGNTYLNWLHQRPGQPPRLLI |
| | GNGGRIYYAESVKGRFTISRDNSKSTF | YKIDNRFSGVPDRFSGSGAGTDFTLKI |
| | YLQMNSLRAEDTAVYYCAKDLDVW | SRVEAEDVGVYYCMQATQFPLTFGG |
| | GKGTTVTVSS | GTKLEIK |
| CB21-498-134 | EVQLVESGGGLVQPGGSLRLSCAASG | DVVMTQTPLSSPVTLGQSASISCRSSQ |
| | FTFSSYAMNWVRQAPGKGLEGVSGIS | SLVHSDANTYLNWLHQRPGQPPRLLI |
| | GSGGRAYYAESVKGRFQISRDNSKST | YKISNRFSGVPDRFSGSGSGTDFTLKI |
| | FYLQMNSLRAEDTAVYYCAKDLDVW | SRVEAEDVGVYYCMQATQFPLTFGG |
| | GKGTTVTVSS | GTKLEIK |
| CB21-498-135 | EVQLVESGGGLVQPGGSLRLSCAASG | DVVMTQTPLSSPVTLGQSASISCRSSQ |
| | FTFSSYAMNWVRQAPGRGLEGVSGIS | SLVHSDANTYLNWLHQRPGQPPRLLI |
| | GSGGRIYYAESVKGRFQISRDNSKSTF | YKISNRFSGVPDRFSGSGSGTDFTLKI |
| | YLQMNSLRAEDTAVYYCAKDLDVW | SRVEAEDVGVYYCMQATQFPLTFGG |
| | GKGTTVTVSS | GTKLEIK |
| CB21-498-136 | EVQLVESGGGLVQPGGSLRLSCAASG | DVVMTQTPLSSPVTLGQSASISCRSSQ |
| | FTFSDYAMNWVRQAPGKGLEGVSGIS | SLVHSDANTYLNWLHQRPGQPPRLLI |
| | GSGGRIYYAESVKGRFQISRDNSKSTF | YKISNRFSGVPDRFSGSGSGTDFTLKI |
| | YLQMNSLRAEDTAVYYCAKDLDVW | SRVEAEDVGVYYCMQATQFPLTFGG |
| | GKGTTVTVSS | GTKLEIK |
| CB21-498-137 | EVQLVESGGGLVQPGGSLRLSCAASG | DVVMTQTPLSSPVTLGQSASISCRSSQ |
| | FTFSSYAMNWVRQAPGRGLEGVSGIS | SLVHSDANTYLNWLHQRPGQPPRLLI |
| | GSGGRAYYAESVKGRFTISRDNSKSTF | YKISNRFSGVPDRFSGSGSGTDFTLKI |
| | YLQMNSLRAEDTAVYYCAKDLDVW | SRVEAEDVGVYYCMQATQFPLTFGG |
| | GKGTTVTVSS | GTKLEIK |
| CB21-498-138 | EVQLVESGGGLVQPGGSLRLSCAASG | DVVMTQTPLSSPVTLGQSASISCRSSQ |
| | FTFSDYAMNWVRQAPGKGLEGVSGIS | SLVHSDANTYLNWLHQRPGQPPRLLI |
| | GSGGRAYYAESVKGRFTISRDNSKSTF | YKISNRFSGVPDRFSGSGSGTDFTLKI |
| | YLQMNSLRAEDTAVYYCAKDLDVW | SRVEAEDVGVYYCMQATQFPLTFGG |
| | GKGTTVTVSS | GTKLEIK |
| CB21-498-139 | EVQLVESGGGLVQPGGSLRLSCAASG | DVVMTQTPLSSPVTLGQSASISCRSSQ |
| | FTFSDYAMNWVRQAPGRGLEGVSGIS | SLVHSDANTYLNWLHQRPGQPPRLLI |
| | GSGGRIYYAESVKGRFTISRDNSKSTF | YKISNRFSGVPDRFSGSGSGTDFTLKI |
| | YLQMNSLRAEDTAVYYCAKDLDVW | SRVEAEDVGVYYCMQATQFPLTFGG |
| | GKGTTVTVSS | GTKLEIK |
| CB21-498-140 | EVQLVESGGGLVQPGGSLRLSCAASG | DVVMTQTPLSSPVTLGQSASISCRSSQ |
| | FTFSDYAMNWVRQAPGRGLEGVSGIS | SLVHSDANTYLNWLHQRPGQPPRLLI |
| | GSGGRAYYAESVKGRFTISRDNSKSTF | YKISNRFSGVPDRFSGSGSGTDFTLKI |
| | YLQMNSLRAEDTAVYYCAKDLDVW | SRVEAEDVGVYYCMQATQFPLTFGG |
| | GKGTTVTVSS | GTKLEIK |
| CB21-498-141 | EVQLVESGGGLVQPGGSLRLSCAASG | DVVMTQTPLSSPVTLGQSASISCRSSQ |
| | FTFSSYAMNWVRQAPGRGLEGVSGIS | SLVHSDANTYLNWLHQRPGQPPRLLI |
| | GSGGRIYYAESVKGRFTISRDNSKSTF | YKISNRFSGVPDRFSGSGSGTDFTLKI |
| | YLQMNSLRAEDTAVYYCAKDLDVW | SRVEAEDVGVYYCMQATQFPLTFGG |
| | GKGTTVTVSS | GTKLEIK |
| CB21-498-142 | EVQLVESGGGLVQPGGSLRLSCAASG | DVVMTQTPLSSPVTLGQSASISCRSSQ |
| | FTFSSYAMNWVRQAPGKGLEGVSGIS | SLVHSDANTYLNWLHQRPGQPPRLLI |
| | GSGGRIYYAESVKGRFQISRDNSKSTF | YKISNRFSGVPDRFSGSGSGTDFTLKI |
| | YLQMNSLRAEDTAVYYCAKDLDVW | SRVEAEDVGVYYCMQATQFPLTFGG |
| | GKGTTVTVSS | GTKLEIK |
| CB21-498-143 | EVQLVESGGGLVQPGGSLRLSCAASG | DVVMTQTPLSSPVTLGQPASISCRSSQ |
| | FTFSSYAMNWVRQAPGRGLEGVSGIS | SLVHSDGNTYLNWLQQRPGQPPRLLI |
| | GSGGRIYYAESVKGRFQISRDNSKSTF | YKISNRFSGVPDRFSGSGAGTDFTLKI |
| | YLQMNSLRAEDTAVYYCAKDLDVW | SRVEAEDVGVYYCMQATQFPLTFGG |
| | GKGTTVTVSS | GTKVEIK |
| CB21-499 | EVQLVESGGGVVQPGRSLRLSCAASG | DIQMTQSPSSLSASVGDRVTITCRASQ |
| | FTFSSYGMHWVRQAPGKGLEWVAVI | GVRNDFGWFQQKPGKAPKRLIYGAS |
| | WYDGSNKDYADSVKGRFTISRDNSK | SLQSGVPSRFSGSGSGTEFTLTISSLQP |
| | NTLYLQMNSLRAEDTAIYYCARPGEG | EDFATYYCLQQNSYPWTFGQGTKLEI |
| | DYWGQGTLVTVSS | K |
| CB21-499-001 | EVQLVESGGGVVQPGRSLRLSCAASG | DIQMTQSPSSLSASVGDRVTITCRASQ |
| | FTFSSYGMHWVRQAPGKGLEWVAVI | GVRNDFGWFQQKPGKAPKRLIYGAS |
| | WYDASNKDYADSVKGRFTISRDNSK | SLQSGVPSRFSGSGSGTEFTLTISSLQP |
| | NTLYLQMNSLRAEDTAIYYCARPGEG | EDFATYYCLQQNSYPWTFGQGTKLEI |
| | DYWGQGTLVTVSS | K |
| CB21-499-002 | EVQLVESGGGVVQPGRSLRLSCAASG | DIQMTQSPSSLSASVGDRVTITCRASQ |
| | FTFSSYGMHWVRQAPGKGLEWVAVI | GVRNDFGWFQQKPGKAPKRLIYGAS |
| | WYDPSNKDYADSVKGRFTISRDNSKN | SLQSGVPSRFSGSGSGTEFTLTISSLQP |
| | TLYLQMNSLRAEDTAIYYCARPGEGD | EDFATYYCLQQNSYPWTFGQGTKLEI |
| | YWGQGTLVTVSS | K |
| CB21-499-003 | EVQLVESGGGVVQPGRSLRLSCAASG | DIQMTQSPSSLSASVGDRVTITCRASQ |
| | FTFSSYGMHWVRQAPGKGLEWVAVI | GVRNDFGWFQQKPGKAPKRLIYGAS |
| | WYEGSNKDYADSVKGRFTISRDNSK | SLQSGVPSRFSGSGSGTEFTLTISSLQP |
| | NTLYLQMNSLRAEDTAIYYCARPGEG | EDFATYYCLQQNSYPWTFGQGTKLEI |
| | DYWGQGTLVTVSS | K |
| CB21-499-004 | EVQLVESGGGVVQPGRSLRLSCAASG | DIQMTQSPSSLSASVGDRVTITCRASQ |
| | FTFSSYGMHWVRQAPGKGLEWVAVI | GVRNDFGWFQQKPGKAPKRLIYGAS |
| | WYSGSNKDYADSVKGRFTISRDNSKN | SLQSGVPSRFSGSGSGTEFTLTISSLQP |
| | TLYLQMNSLRAEDTAIYYCARPGEGD | EDFATYYCLQQNSYPWTFGQGTKLEI |
| | YWGQGTLVTVSS | K |
| CB21-499-005 | EVQLVESGGGVVQPGRSLRLSCAASG | DIQMTQSPSSLSASVGDRVTITCRASQ |
| | FTFSSYGMHWVRQAPGKGLEWVAVI | GVRNDFGWFQQKPGKAPKRLIYGAS |
| | WYDGSNKDYAPSVKGRFTISRDNSKN | SLQSGVPSRFSGSGSGTEFTLTISSLQP |
| | TLYLQMNSLRAEDTAIYYCARPGEGD | EDFATYYCLQQNSYPWTFGQGTKLEI |
| | YWGQGTLVTVSS | K |
| CB21-499-006 | EVQLVESGGGVVQPGRSLRLSCAASG | DIQMTQSPSSLSASVGDRVTITCRASQ |
| | FTFSSYGMHWVRQAPGKGLEWVAVI | GVRNDFGWFQQKPGKAPKRLIYGAS |
| | WYDGSNKDYAQSVKGRFTISRDNSK | SLQSGVPSRFSGSGSGTEFTLTISSLQP |
| | NTLYLQMNSLRAEDTAIYYCARPGEG | EDFATYYCLQQNSYPWTFGQGTKLEI |
| | DYWGQGTLVTVSS | K |
| CB21-499-007 | EVQLVESGGGVVQPGRSLRLSCAASG | DIQMTQSPSSLSASVGDRVTITCRASQ |
| | FTFSSYGMHWVRQAPGKGLEWVAVI | GVRNDFGWFQQKPGKAPKRLIYGAS |
| | WYDGSNKDYAESVKGRFTISRDNSK | SLQSGVPSRFSGSGSGTEFTLTISSLQP |
| | NTLYLQMNSLRAEDTAIYYCARPGEG | EDFATYYCLQQNSYPWTFGQGTKLEI |
| | DYWGQGTLVTVSS | K |
| CB21-499-008 | EVQLVESGGGVVQPGRSLRLSCAASG | DIQMTQSPSSLSASVGDRVTITCRASQ |
| | FTFSSYGMHWVRQAPGKGLEWVAVI | GVRNDFGWFQQKPGKAPKRLIYGAS |
| | WYDGSNKDYADAVKGRFTISRDNSK | SLQSGVPSRFSGSGSGTEFTLTISSLQP |
| | NTLYLQMNSLRAEDTAIYYCARPGEG | EDFATYYCLQQNSYPWTFGQGTKLEI |
| | DYWGQGTLVTVSS | K |
| CB21-499-009 | EVQLVESGGGVVQPGRSLRLSCAASG | DIQMTQSPSSLSASVGDRVTITCRASQ |
| | FTFSSYGMHWVRQAPGKGLEWVAVI | GVRNDFGWFQQKPGKAPKRLIYGAS |
| | WYDGSNKDYADSVKGRFTISRDNSK | SLQSGVPSRFSGSGSGTEFTLTISSLQP |
| | NTLYLQMNSLRAEDTAIYYCARDGEG | EDFATYYCLQQNSYPWTFGQGTKLEI |
| | DYWGQGTLVTVSS | K |
| CB21-499-010 | EVQLVESGGGVVQPGGSLRLSCAASG | DIQMTQSPSSLSASVGDRVTITCRASQ |
| | FTFSSYGMHWVRQAPGKGLEWVAVI | GVRNDFGWFQQKPGKAPKRLIYGAS |
| | WYDGSNKDYADSVKGRFTISRDNSK | SLQSGVPSRFSGSGSGTEFTLTISSLQP |
| | NTLYLQMNSLRAEDTAIYYCARPGEG | EDFATYYCLQQNSYPWTFGQGTKLEI |
| | DYWGQGTLVTVSS | K |
| CB21-499-011 | EVQLVESGGGVVQPGRSLRLSCAASG | DIQMTQSPSSLSASVGDRVTITCRASQ |
| | FTFSSYGMHWVRQAPGKGLEWVAVI | GVRNDFGWFQQKPGKAPKRLIYGAS |
| | WYDGSNKYYADSVKGRFTISRDNSK | SLQSGVPSRFSGSGSGTEFTLTISSLQP |
| | NTLYLQMNSLRAEDTAIYYCARPGEG | EDFATYYCLQQNSYPWTFGQGTKLEI |
| | DYWGQGTLVTVSS | K |
| CB21-499-012 | EVQLVESGGGVVQPGRSLRLSCAASG | DIQMTQSPSSLSASVGDRVTITCRASQ |
| | FTFSSYGMHWVRQAPGKGLEWVAVI | GVRNDFGWFQQKPGKAPKRLIYGAS |
| | WYDGSSKDYADSVKGRFTISRDNSKN | SLQSGVPSRFSGSGSGTEFTLTISSLQP |
| | TLYLQMNSLRAEDTAIYYCARPGEGD | EDFATYYCLQQNSYPWTFGQGTKLEI |
| | YWGQGTLVTVSS | K |
| CB21-499-013 | EVQLVESGGGVVQPGRSLRLSCAASG | DIQMTQSPSSLSASVGDRVTITCRASQ |
| | FTFSSYGMHWVRQAPGKGLEWVAVI | GVRNDFGWFQQKPGKAPKRLIYGAS |
| | WYDGSNKDYADSVKGRFTISRDNSK | SLQSGVPSRFSGSGSGTEFTLTISSLQP |
| | NTLYLQMNSLRAEDTAIYYCARPGYG | EDFATYYCLQQNSYPWTFGQGTKLEI |
| | DYWGQGTLVTVSS | K |
| CB21-499-014 | EVQLVESGGGVVQPGRSLRLSCAASG | DIQMTQSPSSLSASVGDRVTITCRASQ |
| | FTFSSYGMHWVRQAPGKGLEWVAVI | GVRNDFGWFQQKPGKAPKRLIYGAS |
| | WYDGSNKDYADSVKGRFTISRDNSK | SLQSGVPSRFSGSGSGTEFTLTISSLQP |
| | NTLYLQMNSLRAEDTAIYYCARPGEG | EDFATYYCLQQNSYPWTFGQGTKLEI |
| | DYWGQGTKVTVSS | K |
| CB21-499-015 | EVQLVESGGGVVQPGRSLRLSCAASG | DIQMTQSPSSLSASVGDRVTITCRASQ |
| | FTFSSYGMHWVRQAPGKGLEWVAVI | GVRNDFGWFQQKPGKAPKRLIYGAS |
| | WYDGSNKDYADSVKGRFTISRDNSK | SLQSGVPSRFSGSGSGTEFTLTISSLQP |
| | NTLYLQMNSLRAEDTAVYYCARPGE | EDFATYYCLQQNSYPWTFGQGTKLEI |
| | GDYWGQGTLVTVSS | K |
| CB21-499-016 | EVQLVESGGGVVQPGRSLRLSCAASG | DIQMTQSPSSLSASVGDRVTITCRASQ |
| | FTFSSYGMHWVRQAPGKGLEWVAVI | GVRNDFGWFQQKPGKAPKRLIYGAS |
| | WYDGSNKDYADSVKGRFTISRDNSK | SLQSGVPSRFSGSGSGTEFTLTISSLQP |
| | NTLYLQMNSLRAEDTAIYYCARPGEF | EDFATYYCLQQNSYPWTFGQGTKLEI |
| | DYWGQGTLVTVSS | K |
| CB21-499-017 | EVQLVESGGGVVQPGRSLRLSCAASG | DIQMTQSPSSLSASVGDRVTITCRASQ |
| | FTFSSYGMHWVRQAPGKGLEWVAVI | GVRNDFGWFQQKPGKAPKLLIYGAS |
| | WYDGSNKDYADSVKGRFTISRDNSK | SLQSGVPSRFSGSGSGTEFTLTISSLQP |
| | NTLYLQMNSLRAEDTAIYYCARPGEG | EDFATYYCLQQNSYPWTFGQGTKLEI |
| | DYWGQGTLVTVSS | K |
| CB21-499-018 | EVQLVESGGGVVQPGRSLRLSCAASG | DIQMTQSPSSLSASVGDRVTITCRASQ |
| | FTFSSYGMHWVRQAPGKGLEWVAVI | GVRNDLGWFQQKPGKAPKRLIYGAS |
| | WYDGSNKDYADSVKGRFTISRDNSK | SLQSGVPSRFSGSGSGTEFTLTISSLQP |
| | NTLYLQMNSLRAEDTAIYYCARPGEG | EDFATYYCLQQNSYPWTFGQGTKLEI |
| | DYWGQGTLVTVSS | K |
| CB21-499-019 | EVQLVESGGGVVQPGRSLRLSCAASG | DIQMTQSPSSLSASVGDRVTITCRASQ |
| | FTFSSYGMHWVRQAPGKGLEWVAVI | GVRNDFGWFQQKPGKAPKRLIYGAS |
| | WYDGSNKDYADSVKGRFTISRDNSK | SLQSGVPSRFSGSGSGTEFTLTISSLQP |
| | NTLYLQMNSLRAEDTAIYYCARPGEG | EDFATYYCQQQNSYPWTFGQGTKLEI |
| | DYWGQGTLVTVSS | K |
| CB21-499-020 | EVQLVESGGGVVQPGRSLRLSCAASG | DIQMTQSPSSLSASVGDRVTITCRASQ |
| | FTFSSYGMHWVRQAPGKGLEWVAVI | GVSNDFGWFQQKPGKAPKRLIYGASS |
| | WYDGSNKDYADSVKGRFTISRDNSK | LQSGVPSRFSGSGSGTEFTLTISSLQPE |
| | NTLYLQMNSLRAEDTAIYYCARPGEG | DFATYYCLQQNSYPWTFGQGTKLEIK |
| | DYWGQGTLVTVSS | |
| CB21-499-021 | EVQLVESGGGVVQPGRSLRLSCAASG | DIQMTQSPSSLSASVGDRVTITCRASQ |
| | FTFSSYGMHWVRQAPGKGLEWVAVI | GVRNDFGWFQQKPGKAPKRLIYGAS |
| | WYDGSNKDYADSVKGRFTISRDNSK | SLQSGVPSRFSGSGSGTDFTLTISSLQP |
| | NTLYLQMNSLRAEDTAIYYCARPGEG | EDFATYYCLQQNSYPWTFGQGTKLEI |
| | DYWGQGTLVTVSS | K |
| CB21-499-022 | EVQLVESGGGVVQPGRSLRLSCAASG | DIQMTQSPSSLSASVGDRVTITCRASQ |
| | FTFSSYGMHWVRQAPGKGLEWVAVI | GVRNDFGWFQQKPGKAPKRLIYGAS |
| | WYDGSNKDYADSVKGRFTISRDNSK | SLQSGVPSRFSGSGSGTEFTLTISSLQP |
| | NTLYLQMNSLRAEDTAIYYCARPGEG | EDFATYYCLQYNSYPWTFGQGTKLEI |
| | DYWGQGTLVTVSS | K |
| CB21-499-023 | EVQLVESGGGVVQPGRSLRLSCAASG | DIQMTQSPSSLSASVGDRVTITCRASQ |
| | FTFSSYGMHWVRQAPGKGLEWVAVI | GVRNDFGWFQQKPGKAPKRLIYGAS |
| | WYDGSNKDYADSVKGRFTISRDNSK | SLQSGVPSRFSGSGSGTEFTLTISSLQP |
| | NTLYLQMNSLRAEDTAIYYCARPGEG | EDFATYYCLQQNSYPFTFGQGTKLEIK |
| | DYWGQGTLVTVSS | |
| CB21-499-024 | EVQLVESGGGVVQPGRSLRLSCAASG | DIQMTQSPSSLSASVGDRVTITCRASQ |
| | FTFSSYGMHWVRQAPGKGLEWVAVI | GVRNDFGWFQQKPGKAPKRLIYGAS |
| | WYDASNKDYAESVKGRFTISRDNSK | SLQSGVPSRFSGSGSGTEFTLTISSLQP |
| | NTLYLQMNSLRAEDTAIYYCARPGEG | EDFATYYCLQQNSYPWTFGQGTKLEI |
| | DYWGQGTLVTVSS | K |
| CB21-499-025 | EVQLVESGGGVVQPGRSLRLSCAASG | DIQMTQSPSSLSASVGDRVTITCRASQ |
| | FTFSSYGMHWVRQAPGKGLEWVAVI | GVRNDFGWFQQKPGKAPKRLIYGAS |
| | WYDASNKDYAPSVKGRFTISRDNSKN | SLQSGVPSRFSGSGSGTEFTLTISSLQP |
| | TLYLQMNSLRAEDTAIYYCARPGEGD | EDFATYYCLQQNSYPWTFGQGTKLEI |
| | YWGQGTLVTVSS | K |
| CB21-499-026 | EVQLVESGGGVVQPGRSLRLSCKASG | DIQMTQSPSSLSASVGDRVTITCRASQ |
| | FTFSSYGMHWVRQAPGKGLEWVAVI | GVRNDFGWFQQKPGKAPKRLIYGAS |
| | WYDGSNKDYADSVKGRFTISRDNSK | SLQSGVPSRFSGSGSGTEFTLTISSLQP |
| | NTLYLQMNSLRAEDTAIYYCARPGEG | EDFATYYCLQQNSYPWTFGQGTKLEI |
| | DYWGQGTLVTVSS | K |
| CB21-499-027 | EVQLVESGGGVVQPGRSLRLSCNASG | DIQMTQSPSSLSASVGDRVTITCRASQ |
| | FTFSSYGMHWVRQAPGKGLEWVAVI | GVRNDFGWFQQKPGKAPKRLIYGAS |
| | WYDGSNKDYADSVKGRFTISRDNSK | SLQSGVPSRFSGSGSGTEFTLTISSLQP |
| | NTLYLQMNSLRAEDTAIYYCARPGEG | EDFATYYCLQQNSYPWTFGQGTKLEI |
| | DYWGQGTLVTVSS | K |
| CB21-499-028 | EVQLVESGGGVVQPGRSLRLSCQASG | DIQMTQSPSSLSASVGDRVTITCRASQ |
| | FTFSSYGMHWVRQAPGKGLEWVAVI | GVRNDFGWFQQKPGKAPKRLIYGAS |
| | WYDGSNKDYADSVKGRFTISRDNSK | SLQSGVPSRFSGSGSGTEFTLTISSLQP |
| | NTLYLQMNSLRAEDTAIYYCARPGEG | EDFATYYCLQQNSYPWTFGQGTKLEI |
| | DYWGQGTLVTVSS | K |
| CB21-499-029 | EVQLVESGGGVVQPGRSLRLSCATSG | DIQMTQSPSSLSASVGDRVTITCRASQ |
| | FTFSSYGMHWVRQAPGKGLEWVAVI | GVRNDFGWFQQKPGKAPKRLIYGAS |
| | WYDGSNKDYADSVKGRFTISRDNSK | SLQSGVPSRFSGSGSGTEFTLTISSLQP |
| | NTLYLQMNSLRAEDTAIYYCARPGEG | EDFATYYCLQQNSYPWTFGQGTKLEI |
| | DYWGQGTLVTVSS | K |
| CB21-499-030 | EVQLVESGGGVVQPGRSLRLSCAVSG | DIQMTQSPSSLSASVGDRVTITCRASQ |
| | FTFSSYGMHWVRQAPGKGLEWVAVI | GVRNDFGWFQQKPGKAPKRLIYGAS |
| | WYDGSNKDYADSVKGRFTISRDNSK | SLQSGVPSRFSGSGSGTEFTLTISSLQP |
| | NTLYLQMNSLRAEDTAIYYCARPGEG | EDFATYYCLQQNSYPWTFGQGTKLEI |
| | DYWGQGTLVTVSS | K |
| CB21-499-031 | EVQLVESGGGVVQPGRSLRLSCAASG | DIQMTQSPSSLSASVGDRVTITCRASQ |
| | FTFTSYGMHWVRQAPGKGLEWVAVI | GVRNDFGWFQQKPGKAPKRLIYGAS |
| | WYDGSNKDYADSVKGRFTISRDNSK | SLQSGVPSRFSGSGSGTEFTLTISSLQP |
| | NTLYLQMNSLRAEDTAIYYCARPGEG | EDFATYYCLQQNSYPWTFGQGTKLEI |
| | DYWGQGTLVTVSS | K |
| CB21-499-032 | EVQLVESGGGVVQPGRSLRLSCAASG | DIQMTQSPSSLSASVGDRVTITCRASQ |
| | FTFNSYGMHWVRQAPGKGLEWVAVI | GVRNDFGWFQQKPGKAPKRLIYGAS |
| | WYDGSNKDYADSVKGRFTISRDNSK | SLQSGVPSRFSGSGSGTEFTLTISSLQP |
| | NTLYLQMNSLRAEDTAIYYCARPGEG | EDFATYYCLQQNSYPWTFGQGTKLEI |
| | DYWGQGTLVTVSS | K |
| CB21-499-033 | EVQLVESGGGVVQPGRSLRLSCAASG | DIQMTQSPSSLSASVGDRVTITCRASQ |
| | FTFQSYGMHWVRQAPGKGLEWVAVI | GVRNDFGWFQQKPGKAPKRLIYGAS |
| | WYDGSNKDYADSVKGRFTISRDNSK | SLQSGVPSRFSGSGSGTEFTLTISSLQP |
| | NTLYLQMNSLRAEDTAIYYCARPGEG | EDFATYYCLQQNSYPWTFGQGTKLEI |
| | DYWGQGTLVTVSS | K |
| CB21-499-034 | EVQLVESGGGVVQPGRSLRLSCAASG | DIQMTQSPSSLSASVGDRVTITCRASQ |
| | FTFWSYGMHWVRQAPGKGLEWVAVI | GVRNDFGWFQQKPGKAPKRLIYGAS |
| | WYDGSNKDYADSVKGRFTISRDNSK | SLQSGVPSRFSGSGSGTEFTLTISSLQP |
| | NTLYLQMNSLRAEDTAIYYCARPGEG | EDFATYYCLQQNSYPWTFGQGTKLEI |
| | DYWGQGTLVTVSS | K |
| CB21-499-035 | EVQLVESGGGVVQPGRSLRLSCAASG | DIQMTQSPSSLSASVGDRVTITCRASQ |
| | FTFSSYAMHWVRQAPGKGLEWVAVI | GVRNDFGWFQQKPGKAPKRLIYGAS |
| | WYDGSNKDYADSVKGRFTISRDNSK | SLQSGVPSRFSGSGSGTEFTLTISSLQP |
| | NTLYLQMNSLRAEDTAIYYCARPGEG | EDFATYYCLQQNSYPWTFGQGTKLEI |
| | DYWGQGTLVTVSS | K |
| CB21-499-036 | EVQLVESGGGVVQPGRSLRLSCAASG | DIQMTQSPSSLSASVGDRVTITCRASQ |
| | FTFSSYTMHWVRQAPGKGLEWVAVI | GVRNDFGWFQQKPGKAPKRLIYGAS |
| | WYDGSNKDYADSVKGRFTISRDNSK | SLQSGVPSRFSGSGSGTEFTLTISSLQP |
| | NTLYLQMNSLRAEDTAIYYCARPGEG | EDFATYYCLQQNSYPWTFGQGTKLEI |
| | DYWGQGTLVTVSS | K |
| CB21-499-037 | EVQLVESGGGVVQPGRSLRLSCAASG | DIQMTQSPSSLSASVGDRVTITCRASQ |
| | FTFSSYNMHWVRQAPGKGLEWVAVI | GVRNDFGWFQQKPGKAPKRLIYGAS |
| | WYDGSNKDYADSVKGRFTISRDNSK | SLQSGVPSRFSGSGSGTEFTLTISSLQP |
| | NTLYLQMNSLRAEDTAIYYCARPGEG | EDFATYYCLQQNSYPWTFGQGTKLEI |
| | DYWGQGTLVTVSS | K |
| CB21-499-038 | EVQLVESGGGVVQPGRSLRLSCAASG | DIQMTQSPSSLSASVGDRVTITCRASQ |
| | FTFSSYQMHWVRQAPGKGLEWVAVI | GVRNDFGWFQQKPGKAPKRLIYGAS |
| | WYDGSNKDYADSVKGRFTISRDNSK | SLQSGVPSRFSGSGSGTEFTLTISSLQP |
| | NTLYLQMNSLRAEDTAIYYCARPGEG | EDFATYYCLQQNSYPWTFGQGTKLEI |
| | DYWGQGTLVTVSS | K |
| CB21-499-039 | EVQLVESGGGVVQPGRSLRLSCAASG | DIQMTQSPSSLSASVGDRVTITCRASQ |
| | FTFSSYEMHWVRQAPGKGLEWVAVI | GVRNDFGWFQQKPGKAPKRLIYGAS |
| | WYDGSNKDYADSVKGRFTISRDNSK | SLQSGVPSRFSGSGSGTEFTLTISSLQP |
| | NTLYLQMNSLRAEDTAIYYCARPGEG | EDFATYYCLQQNSYPWTFGQGTKLEI |
| | DYWGQGTLVTVSS | K |
| CB21-499-040 | EVQLVESGGGVVQPGRSLRLSCAASG | DIQMTQSPSSLSASVGDRVTITCRASQ |
| | FTFSSYRMHWVRQAPGKGLEWVAVI | GVRNDFGWFQQKPGKAPKRLIYGAS |
| | WYDGSNKDYADSVKGRFTISRDNSK | SLQSGVPSRFSGSGSGTEFTLTISSLQP |
| | NTLYLQMNSLRAEDTAIYYCARPGEG | EDFATYYCLQQNSYPWTFGQGTKLEI |
| | DYWGQGTLVTVSS | K |
| CB21-499-041 | EVQLVESGGGVVQPGRSLRLSCAASG | DIQMTQSPSSLSASVGDRVTITCRASQ |
| | FTFSSYWMHWVRQAPGKGLEWVAVI | GVRNDFGWFQQKPGKAPKRLIYGAS |
| | WYDGSNKDYADSVKGRFTISRDNSK | SLQSGVPSRFSGSGSGTEFTLTISSLQP |
| | NTLYLQMNSLRAEDTAIYYCARPGEG | EDFATYYCLQQNSYPWTFGQGTKLEI |
| | DYWGQGTLVTVSS | K |
| CB21-499-042 | EVQLVESGGGVVQPGRSLRLSCAASG | DIQMTQSPSSLSASVGDRVTITCRASQ |
| | FTFSSYPMHWVRQAPGKGLEWVAVI | GVRNDFGWFQQKPGKAPKRLIYGAS |
| | WYDGSNKDYADSVKGRFTISRDNSK | SLQSGVPSRFSGSGSGTEFTLTISSLQP |
| | NTLYLQMNSLRAEDTAIYYCARPGEG | EDFATYYCLQQNSYPWTFGQGTKLEI |
| | DYWGQGTLVTVSS | K |
| CB21-499-043 | EVQLVESGGGVVQPGRSLRLSCAASG | DIQMTQSPSSLSASVGDRVTITCRASQ |
| | FTFSSYGMHWVRQAPGRGLEWVAVI | GVRNDFGWFQQKPGKAPKRLIYGAS |
| | WYDGSNKDYADSVKGRFTISRDNSK | SLQSGVPSRFSGSGSGTEFTLTISSLQP |
| | NTLYLQMNSLRAEDTAIYYCARPGEG | EDFATYYCLQQNSYPWTFGQGTKLEI |
| | DYWGQGTLVTVSS | K |
| CB21-499-044 | EVQLVESGGGVVQPGRSLRLSCAASG | DIQMTQSPSSLSASVGDRVTITCRASQ |
| | FTFSSYGMHWVRQAPGQGLEWVAVI | GVRNDFGWFQQKPGKAPKRLIYGAS |
| | WYDGSNKDYADSVKGRFTISRDNSK | SLQSGVPSRFSGSGSGTEFTLTISSLQP |
| | NTLYLQMNSLRAEDTAIYYCARPGEG | EDFATYYCLQQNSYPWTFGQGTKLEI |
| | DYWGQGTLVTVSS | K |
| CB21-499-045 | EVQLVESGGGVVQPGRSLRLSCAASG | DIQMTQSPSSLSASVGDRVTITCRASQ |
| | FTFSSYGMHWVRQAPGLGLEWVAVI | GVRNDFGWFQQKPGKAPKRLIYGAS |
| | WYDGSNKDYADSVKGRFTISRDNSK | SLQSGVPSRFSGSGSGTEFTLTISSLQP |
| | NTLYLQMNSLRAEDTAIYYCARPGEG | EDFATYYCLQQNSYPWTFGQGTKLEI |
| | DYWGQGTLVTVSS | K |
| CB21-499-046 | EVQLVESGGGVVQPGRSLRLSCAASG | DIQMTQSPSSLSASVGDRVTITCRASQ |
| | FTFSSYGMHWVRQAPGEGLEWVAVI | GVRNDFGWFQQKPGKAPKRLIYGAS |
| | WYDGSNKDYADSVKGRFTISRDNSK | SLQSGVPSRFSGSGSGTEFTLTISSLQP |
| | NTLYLQMNSLRAEDTAIYYCARPGEG | EDFATYYCLQQNSYPWTFGQGTKLEI |
| | DYWGQGTLVTVSS | K |
| CB21-499-047 | EVQLVESGGGVVQPGRSLRLSCAASG | DIQMTQSPSSLSASVGDRVTITCRASQ |
| | FTFSSYGMHWVRQAPGKRLEWVAVI | GVRNDFGWFQQKPGKAPKRLIYGAS |
| | WYDGSNKDYADSVKGRFTISRDNSK | SLQSGVPSRFSGSGSGTEFTLTISSLQP |
| | NTLYLQMNSLRAEDTAIYYCARPGEG | EDFATYYCLQQNSYPWTFGQGTKLEI |
| | DYWGQGTLVTVSS | K |
| CB21-499-048 | EVQLVESGGGVVQPGRSLRLSCAASG | DIQMTQSPSSLSASVGDRVTITCRASQ |
| | FTFSSYGMHWVRQAPGKALEWVAVI | GVRNDFGWFQQKPGKAPKRLIYGAS |
| | WYDGSNKDYADSVKGRFTISRDNSK | SLQSGVPSRFSGSGSGTEFTLTISSLQP |
| | NTLYLQMNSLRAEDTAIYYCARPGEG | EDFATYYCLQQNSYPWTFGQGTKLEI |
| | DYWGQGTLVTVSS | K |
| CB21-499-049 | EVQLVESGGGVVQPGRSLRLSCAASG | DIQMTQSPSSLSASVGDRVTITCRASQ |
| | FTFSSYGMHWVRQAPGKNLEWVAVI | GVRNDFGWFQQKPGKAPKRLIYGAS |
| | WYDGSNKDYADSVKGRFTISRDNSK | SLQSGVPSRFSGSGSGTEFTLTISSLQP |
| | NTLYLQMNSLRAEDTAIYYCARPGEG | EDFATYYCLQQNSYPWTFGQGTKLEI |
| | DYWGQGTLVTVSS | K |
| CB21-499-050 | EVQLVESGGGVVQPGRSLRLSCAASG | DIQMTQSPSSLSASVGDRVTITCRASQ |
| | FTFSSYGMHWVRQAPGKGLEWVAVI | GVRNDFGWFQQKPGKAPKRLIYGAS |
| | WYDGSNTDYADSVKGRFTISRDNSK | SLQSGVPSRFSGSGSGTEFTLTISSLQP |
| | NTLYLQMNSLRAEDTAIYYCARPGEG | EDFATYYCLQQNSYPWTFGQGTKLEI |
| | DYWGQGTLVTVSS | K |
| CB21-499-051 | EVQLVESGGGVVQPGRSLRLSCAASG | DIQMTQSPSSLSASVGDRVTITCRASQ |
| | FTFSSYGMHWVRQAPGKGLEWVAVI | GVRNDFGWFQQKPGKAPKRLIYGAS |
| | WYDGSNIDYADSVKGRFTISRDNSKN | SLQSGVPSRFSGSGSGTEFTLTISSLQP |
| | TLYLQMNSLRAEDTAIYYCARPGEGD | EDFATYYCLQQNSYPWTFGQGTKLEI |
| | YWGQGTLVTVSS | K |
| CB21-499-052 | EVQLVESGGGVVQPGRSLRLSCAASG | DIQMTQSPSSLSASVGDRVTITCRASQ |
| | FTFSSYGMHWVRQAPGKGLEWVAVI | GVRNDFGWFQQKPGKAPKRLIYGAS |
| | WYDGSNNDYADSVKGRFTISRDNSK | SLQSGVPSRFSGSGSGTEFTLTISSLQP |
| | NTLYLQMNSLRAEDTAIYYCARPGEG | EDFATYYCLQQNSYPWTFGQGTKLEI |
| | DYWGQGTLVTVSS | K |
| CB21-499-053 | EVQLVESGGGVVQPGRSLRLSCAASG | DIQMTQSPSSLSASVGDRVTITCRASQ |
| | FTFSSYGMHWVRQAPGKGLEWVAVI | GVRNDFGWFQQKPGKAPKRLIYGAS |
| | WYDGSNRDYADSVKGRFTISRDNSK | SLQSGVPSRFSGSGSGTEFTLTISSLQP |
| | NTLYLQMNSLRAEDTAIYYCARPGEG | EDFATYYCLQQNSYPWTFGQGTKLEI |
| | DYWGQGTLVTVSS | K |
| CB21-499-054 | EVQLVESGGGVVQPGRSLRLSCAASG | DIQMTQSPSSLSASVGDRVTITCRASQ |
| | FTFSSYGMHWVRQAPGKGLEWVAVI | GVRNDFGWFQQKPGKAPKRLIYGAS |
| | WYDGSNKFYADSVKGRFTISRDNSKN | SLQSGVPSRFSGSGSGTEFTLTISSLQP |
| | TLYLQMNSLRAEDTAIYYCARPGEGD | EDFATYYCLQQNSYPWTFGQGTKLEI |
| | YWGQGTLVTVSS | K |
| CB21-499-055 | EVQLVESGGGVVQPGRSLRLSCAASG | DIQMTQSPSSLSASVGDRVTITCRASQ |
| | FTFSSYGMHWVRQAPGKGLEWVAVI | GVRNDFGWFQQKPGKAPKRLIYGAS |
| | WYDGSNKNYADSVKGRFTISRDNSK | SLQSGVPSRFSGSGSGTEFTLTISSLQP |
| | NTLYLQMNSLRAEDTAIYYCARPGEG | EDFATYYCLQQNSYPWTFGQGTKLEI |
| | DYWGQGTLVTVSS | K |
| CB21-499-056 | EVQLVESGGGVVQPGRSLRLSCAASG | DIQMTQSPSSLSASVGDRVTITCRASQ |
| | FTFSSYGMHWVRQAPGKGLEWVAVI | GVRNDFGWFQQKPGKAPKRLIYGAS |
| | WYDGSNKEYADSVKGRFTISRDNSK | SLQSGVPSRFSGSGSGTEFTLTISSLQP |
| | NTLYLQMNSLRAEDTAIYYCARPGEG | EDFATYYCLQQNSYPWTFGQGTKLEI |
| | DYWGQGTLVTVSS | K |
| CB21-499-057 | EVQLVESGGGVVQPGRSLRLSCAASG | DIQMTQSPSSLSASVGDRVTITCRASQ |
| | FTFSSYGMHWVRQAPGKGLEWVAVI | GVRNDFGWFQQKPGKAPKRLIYGAS |
| | WYDGSNKDYADSVKGRFTITRDNSK | SLQSGVPSRFSGSGSGTEFTLTISSLQP |
| | NTLYLQMNSLRAEDTAIYYCARPGEG | EDFATYYCLQQNSYPWTFGQGTKLEI |
| | DYWGQGTLVTVSS | K |
| CB21-499-058 | EVQLVESGGGVVQPGRSLRLSCAASG | DIQMTQSPSSLSASVGDRVTITCRASQ |
| | FTFSSYGMHWVRQAPGKGLEWVAVI | GVRNDFGWFQQKPGKAPKRLIYGAS |
| | WYDGSNKDYADSVKGRFTILRDNSK | SLQSGVPSRFSGSGSGTEFTLTISSLQP |
| | NTLYLQMNSLRAEDTAIYYCARPGEG | EDFATYYCLQQNSYPWTFGQGTKLEI |
| | DYWGQGTLVTVSS | K |
| CB21-499-059 | EVQLVESGGGVVQPGRSLRLSCAASG | DIQMTQSPSSLSASVGDRVTITCRASQ |
| | FTFSSYGMHWVRQAPGKGLEWVAVI | GVRNDFGWFQQKPGKAPKRLIYGAS |
| | WYDGSNKDYADSVKGRFTINRDNSK | SLQSGVPSRFSGSGSGTEFTLTISSLQP |
| | NTLYLQMNSLRAEDTAIYYCARPGEG | EDFATYYCLQQNSYPWTFGQGTKLEI |
| | DYWGQGTLVTVSS | K |
| CB21-499-060 | EVQLVESGGGVVQPGRSLRLSCAASG | DIQMTQSPSSLSASVGDRVTITCRASQ |
| | FTFSSYGMHWVRQAPGKGLEWVAVI | GVRNDFGWFQQKPGKAPKRLIYGAS |
| | WYDGSNKDYADSVKGRFTISRDNSK | SLQSGVPSRFSGSGSGTEFTLTISSLQP |
| | NTLYLQMNNLRAEDTAIYYCARPGEG | EDFATYYCLQQNSYPWTFGQGTKLEI |
| | DYWGQGTLVTVSS | K |
| CB21-499-061 | EVQLVESGGGVVQPGRSLRLSCAASG | DIQMTQSPSSLSASVGDRVTITCRASQ |
| | FTFSSYGMHWVRQAPGKGLEWVAVI | GVRNDFGWFQQKPGKAPKRLIYGAS |
| | WYDGSNKDYADSVKGRFTISRDNSK | SLQSGVPSRFSGSGSGTEFTLTISSLQP |
| | NTLYLQMNILRAEDTAIYYCARPGEG | EDFATYYCLQQNSYPWTFGQGTKLEI |
| | DYWGQGTLVTVSS | K |
| CB21-499-062 | EVQLVESGGGVVQPGRSLRLSCAASG | DIQMTQSPSSLSASVGDRVTITCRASQ |
| | FTFSSYGMHWVRQAPGKGLEWVAVI | GVRNDFGWFQQKPGKAPKRLIYGAS |
| | WYDGSNKDYADSVKGRFTISRDNSK | SLQSGVPSRFSGSGSGTEFTLTISSLQP |
| | NTLYLQMNELRAEDTAIYYCARPGEG | EDFATYYCLQQNSYPWTFGQGTKLEI |
| | DYWGQGTLVTVSS | K |
| CB21-499-063 | EVQLVESGGGVVQPGRSLRLSCAASG | DIQMTQSPSSLSASVGDRVTITCRASQ |
| | FTFSSYGMHWVRQAPGKGLEWVAVI | IVRNDFGWFQQKPGKAPKRLIYGASS |
| | WYDGSNKDYADSVKGRFTISRDNSK | LQSGVPSRFSGSGSGTEFTLTISSLQPE |
| | NTLYLQMNSLRAEDTAIYYCARPGEG | DFATYYCLQQNSYPWTFGQGTKLEIK |
| | DYWGQGTLVTVSS | |
| CB21-499-064 | EVQLVESGGGVVQPGRSLRLSCAASG | DIQMTQSPSSLSASVGDRVTITCRASQ |
| | FTFSSYGMHWVRQAPGKGLEWVAVI | SVRNDFGWFQQKPGKAPKRLIYGASS |
| | WYDGSNKDYADSVKGRFTISRDNSK | LQSGVPSRFSGSGSGTEFTLTISSLQPE |
| | NTLYLQMNSLRAEDTAIYYCARPGEG | DFATYYCLQQNSYPWTFGQGTKLEIK |
| | DYWGQGTLVTVSS | |
| CB21-499-065 | EVQLVESGGGVVQPGRSLRLSCAASG | DIQMTQSPSSLSASVGDRVTITCRASQ |
| | FTFSSYGMHWVRQAPGKGLEWVAVI | GIRNDFGWFQQKPGKAPKRLIYGASS |
| | WYDGSNKDYADSVKGRFTISRDNSK | LQSGVPSRFSGSGSGTEFTLTISSLQPE |
| | NTLYLQMNSLRAEDTAIYYCARPGEG | DFATYYCLQQNSYPWTFGQGTKLEIK |
| | DYWGQGTLVTVSS | |
| CB21-499-066 | EVQLVESGGGVVQPGRSLRLSCAASG | DIQMTQSPSSLSASVGDRVTITCRASQ |
| | FTFSSYGMHWVRQAPGKGLEWVAVI | GVRNEFGWFQQKPGKAPKRLIYGASS |
| | WYDGSNKDYADSVKGRFTISRDNSK | LQSGVPSRFSGSGSGTEFTLTISSLQPE |
| | NTLYLQMNSLRAEDTAIYYCARPGEG | DFATYYCLQQNSYPWTFGQGTKLEIK |
| | DYWGQGTLVTVSS | |
| CB21-499-067 | EVQLVESGGGVVQPGRSLRLSCAASG | DIQMTQSPSSLSASVGDRVTITCRASQ |
| | FTFSSYGMHWVRQAPGKGLEWVAVI | GVRNLFGWFQQKPGKAPKRLIYGASS |
| | WYDGSNKDYADSVKGRFTISRDNSK | LQSGVPSRFSGSGSGTEFTLTISSLQPE |
| | NTLYLQMNSLRAEDTAIYYCARPGEG | DFATYYCLQQNSYPWTFGQGTKLEIK |
| | DYWGQGTLVTVSS | |
| CB21-499-068 | EVQLVESGGGVVQPGRSLRLSCAASG | DIQMTQSPSSLSASVGDRVTITCRASQ |
| | FTFSSYGMHWVRQAPGKGLEWVAVI | GVRNYFGWFQQKPGKAPKRLIYGAS |
| | WYDGSNKDYADSVKGRFTISRDNSK | SLQSGVPSRFSGSGSGTEFTLTISSLQP |
| | NTLYLQMNSLRAEDTAIYYCARPGEG | EDFATYYCLQQNSYPWTFGQGTKLEI |
| | DYWGQGTLVTVSS | K |
| CB21-499-069 | EVQLVESGGGVVQPGRSLRLSCAASG | DIQMTQSPSSLSASVGDRVTITCRASQ |
| | FTFSSYGMHWVRQAPGKGLEWVAVI | GVRNDFGWFQQKPGQAPKRLIYGAS |
| | WYDGSNKDYADSVKGRFTISRDNSK | SLQSGVPSRFSGSGSGTEFTLTISSLQP |
| | NTLYLQMNSLRAEDTAIYYCARPGEG | EDFATYYCLQQNSYPWTFGQGTKLEI |
| | DYWGQGTLVTVSS | K |
| CB21-499-070 | EVQLVESGGGVVQPGRSLRLSCAASG | DIQMTQSPSSLSASVGDRVTITCRASQ |
| | FTFSSYGMHWVRQAPGKGLEWVAVI | GVRNDFGWFQQKPGTAPKRLIYGASS |
| | WYDGSNKDYADSVKGRFTISRDNSK | LQSGVPSRFSGSGSGTEFTLTISSLQPE |
| | NTLYLQMNSLRAEDTAIYYCARPGEG | DFATYYCLQQNSYPWTFGQGTKLEIK |
| | DYWGQGTLVTVSS | |
| CB21-499-071 | EVQLVESGGGVVQPGRSLRLSCAASG | DIQMTQSPSSLSASVGDRVTITCRASQ |
| | FTFSSYGMHWVRQAPGKGLEWVAVI | GVRNDFGWFQQKPGRAPKRLIYGAS |
| | WYDGSNKDYADSVKGRFTISRDNSK | SLQSGVPSRFSGSGSGTEFTLTISSLQP |
| | NTLYLQMNSLRAEDTAIYYCARPGEG | EDFATYYCLQQNSYPWTFGQGTKLEI |
| | DYWGQGTLVTVSS | K |
| CB21-499-072 | EVQLVESGGGVVQPGRSLRLSCAASG | DIQMTQSPSSLSASVGDRVTITCRASQ |
| | FTFSSYGMHWVRQAPGKGLEWVAVI | GVRNDFGWFQQKPGKAPKRLIYGAS |
| | WYDGSNKDYADSVKGRFTISRDNSK | QLQSGVPSRFSGSGSGTEFTLTISSLQP |
| | NTLYLQMNSLRAEDTAIYYCARPGEG | EDFATYYCLQQNSYPWTFGQGTKLEI |
| | DYWGQGTLVTVSS | K |
| CB21-499-073 | EVQLVESGGGVVQPGRSLRLSCAASG | DIQMTQSPSSLSASVGDRVTITCRASQ |
| | FTFSSYGMHWVRQAPGKGLEWVAVI | GVRNDFGWFQQKPGKAPKRLIYGAS |
| | WYDGSNKDYADSVKGRFTISRDNSK | NLQSGVPSRFSGSGSGTEFTLTISSLQP |
| | NTLYLQMNSLRAEDTAIYYCARPGEG | EDFATYYCLQQNSYPWTFGQGTKLEI |
| | DYWGQGTLVTVSS | K |
| CB21-499-074 | EVQLVESGGGVVQPGRSLRLSCAASG | DIQMTQSPSSLSASVGDRVTITCRASQ |
| | FTFSSYGMHWVRQAPGKGLEWVAVI | GVRNDFGWFQQKPGKAPKRLIYGAS |
| | WYDGSNKDYADSVKGRFTISRDNSK | TLQSGVPSRFSGSGSGTEFTLTISSLQP |
| | NTLYLQMNSLRAEDTAIYYCARPGEG | EDFATYYCLQQNSYPWTFGQGTKLEI |
| | DYWGQGTLVTVSS | K |
| CB21-499-075 | EVQLVESGGGVVQPGRSLRLSCAASG | DIQMTQSPSSLSASVGDRVTITCRASQ |
| | FTFSSYGMHWVRQAPGKGLEWVAVI | GVRNDFGWFQQKPGKAPKRLIYGAS |
| | WYDGSNKDYADSVKGRFTISRDNSK | SLQSGVPSRFSGSKSGTEFTLTISSLQP |
| | NTLYLQMNSLRAEDTAIYYCARPGEG | EDFATYYCLQQNSYPWTFGQGTKLEI |
| | DYWGQGTLVTVSS | K |
| CB21-499-076 | EVQLVESGGGVVQPGRSLRLSCAASG | DIQMTQSPSSLSASVGDRVTITCRASQ |
| | FTFSSYGMHWVRQAPGKGLEWVAVI | GVRNDFGWFQQKPGKAPKRLIYGAS |
| | WYDGSNKDYADSVKGRFTISRDNSK | SLQSGVPSRFSGSGSGTEFTLTISRLQP |
| | NTLYLQMNSLRAEDTAIYYCARPGEG | EDFATYYCLQQNSYPWTFGQGTKLEI |
| | DYWGQGTLVTVSS | K |
| CB21-499-077 | EVQLVESGGGVVQPGRSLRLSCAASG | DIQMTQSPSSLSASVGDRVTITCRASQ |
| | FTFSSYGMHWVRQAPGKGLEWVAVI | GVRNDFGWFQQKPGKAPKRLIYGAS |
| | WYDGSNKDYADSVKGRFTISRDNSK | SLQSGVPSRFSGSGSGTEFTLTISLLQP |
| | NTLYLQMNSLRAEDTAIYYCARPGEG | EDFATYYCLQQNSYPWTFGQGTKLEI |
| | DYWGQGTLVTVSS | K |
| CB21-499-078 | EVQLVESGGGVVQPGRSLRLSCAASG | DIQMTQSPSSLSASVGDRVTITCRASQ |
| | FTFSSYGMHWVRQAPGKGLEWVAVI | GVRNDFGWFQQKPGKAPKRLIYGAS |
| | WYDGSNKDYADSVKGRFTISRDNSK | SLQSGVPSRFSGSGSGTEFTLTISTLQP |
| | NTLYLQMNSLRAEDTAIYYCARPGEG | EDFATYYCLQQNSYPWTFGQGTKLEI |
| | DYWGQGTLVTVSS | K |
| CB21-499-079 | EVQLVESGGGVVQPGRSLRLSCAASG | DIQMTQSPSSLSASVGDRVTITCRASQ |
| | FTFSSYGMHWVRQAPGKGLEWVAVI | GVRNDFGWFQQKPGKAPKRLIYGAS |
| | WYDGSNKDYADSVKGRFTISRDNSK | SLQSGVPSRFSGSGSGTEFTLTISSLQP |
| | NTLYLQMNSLRAEDTAIYYCARPGEG | EDFADYYCLQQNSYPWTFGQGTKLEI |
| | DYWGQGTLVTVSS | K |
| CB21-499-080 | EVQLVESGGGVVQPGRSLRLSCAASG | DIQMTQSPSSLSASVGDRVTITCRASQ |
| | FTFSSYGMHWVRQAPGKGLEWVAVI | GVRNDFGWFQQKPGKAPKRLIYGAS |
| | WYDGSNKDYADSVKGRFTISRDNSK | SLQSGVPSRFSGSGSGTEFTLTISSLQP |
| | NTLYLQMNSLRAEDTAIYYCARPGEG | EDFAVYYCLQQNSYPWTFGQGTKLEI |
| | DYWGQGTLVTVSS | K |
| CB21-499-081 | EVQLVESGGGVVQPGRSLRLSCAASG | DIQMTQSPSSLSASVGDRVTITCRASQ |
| | FTFSSYGMHWVRQAPGKGLEWVAVI | GVRNDFGWFQQKPGKAPKRLIYGAS |
| | WYDGSNKDYADSVKGRFTISRDNSK | SLQSGVPSRFSGSGSGTEFTLTISSLQP |
| | NTLYLQMNSLRAEDTAIYYCARPGEG | EDFATYYCLQQNSYPWTFGQGTKVEI |
| | DYWGQGTLVTVSS | K |
| CB21-499-082 | EVQLVESGGGVVQPGRSLRLSCAASG | DIQMTQSPSSLSASVGDRVTITCRASQ |
| | FTFSSYAMHWVRQAPGKGLEWVAVIS | GVRNDFGWFQQKPGKAPKRLIYGAS |
| | YDGSNKYYADSVKGRFTISRDNSKNT | SLQSGVPSRFSGSGSGTEFTLTISSLQP |
| | LYLQMNSLRAEDTAVYYCARPGEGD | EDFATYYCLQQNSYPWTFGQGTKLEI |
| | YWGQGTLVTVSS | K |
| CB21-499-083 | EVQLVESGGGVVQPGRSLRLSCAASG | DIQMTQSPSSLSASVGDRVTITCRASQ |
| | FTFSSYGMHWVRQVPGKGLEWVAVI | GVRNDFGWFQQKPGKAPKRLIYGAS |
| | WYDASNKDYAPSVKGRFTISRDNSKN | SLQSGVPSRFSGSGSGTEFTLTISSLQP |
| | TLYLQMNSLRAEDTAIYYCARPGEGD | EDFATYYCLQQNSYPWTFGQGTKLEI |
| | YWGQGTLVTVSS | K |
| CB21-499-084 | EVQLVESGGGVVQPGRSLRLSCAASG | DIQMTQSPSSLSASVGDRVTITCRASQ |
| | FTFSSYGMHWVRQAPGKGLEWVAVI | GVRNDFGWFQQKPGKAPKRLIYGAS |
| | WYDASNKDYVPSVKGRFTISRDNSK | SLQSGVPSRFSGSGSGTEFTLTISSLQP |
| | NTLYLQMNSLRAEDTAIYYCARPGEG | EDFATYYCLQQNSYPWTFGQGTKLEI |
| | DYWGQGTLVTVSS | K |
| CB21-499-085 | EVQLVESGGGVVQPGRSLRLSCAASG | DIQMTQSPSSLSASVGDRVTITCRASQ |
| | FTFSSYGMHWVRQAPGKGLEWVAVI | GVRNDFGWFQQKPGKAPKRLIYGAS |
| | WYDASNKDYAPSVKGRFTISRDNSKN | SLQSGVPSRFSGSGSGTEFTLTISSLQP |
| | TLYLQMNSLRAEDTAVYYCARPGEG | EDFATYYCLQQNSYPWTFGQGTKLEI |
| | DYWGQGTLVTVSS | K |
| CB21-499-086 | EVQLVESGGGVVQPGRSLRLSCAASG | DIQMTQSPSSLSASVGDRVTITCRASQ |
| | FTFSSYGMHWVRQVPGKGLEWVAVI | GVRNDFGWFQQKPGKAPKRLIYGAS |
| | WYDASNKDYVPSVKGRFTISRDNSK | SLQSGVPSRFSGSGSGTEFTLTISSLQP |
| | NTLYLQMNSLRAEDTAIYYCARPGEG | EDFATYYCLQQNSYPWTFGQGTKLEI |
| | DYWGQGTLVTVSS | K |
| CB21-499-087 | EVQLVESGGGVVQPGRSLRLSCAASG | DIQMTQSPSSLSASVGDRVTITCRASQ |
| | FTFSSYGMHWVRQVPGKGLEWVAVI | GVRNDFGWFQQKPGKAPKRLIYGAS |
| | WYDASNKDYAPSVKGRFTISRDNSKN | SLQSGVPSRFSGSGSGTEFTLTISSLQP |
| | TLYLQMNSLRAEDTAVYYCARPGEG | EDFATYYCLQQNSYPWTFGQGTKLEI |
| | DYWGQGTLVTVSS | K |
| CB21-499-088 | EVQLVESGGGVVQPGRSLRLSCAASG | DIQMTQSPSSLSASVGDRVTITCRASQ |
| | FTFSSYGMHWVRQAPGKGLEWVAVI | GVRNDFGWFQQKPGKAPKRLIYGAS |
| | WYDASNKDYVPSVKGRFTISRDNSK | SLQSGVPSRFSGSGSGTEFTLTISSLQP |
| | NTLYLQMNSLRAEDTAVYYCARPGE | EDFATYYCLQQNSYPWTFGQGTKLEI |
| | GDYWGQGTLVTVSS | K |
| CB21-499-089 | EVQLVESGGGVVQPGRSLRLSCAASG | DIQMTQSPSSLSASVGDRVTITCRASQ |
| | FTFSSYGMHWVRQVPGKGLEWVAVI | GVRNDFGWFQQKPGKAPKRLIYGAS |
| | WYDASNKDYVPSVKGRFTISRDNSK | SLQSGVPSRFSGSGSGTEFTLTISSLQP |
| | NTLYLQMNSLRAEDTAVYYCARPGE | EDFATYYCLQQNSYPWTFGQGTKLEI |
| | GDYWGQGTLVTVSS | K |
| CB21-499-090 | EVQLVESGGGVVQPGRSLRLSCAASG | DIQMTQSPSSLSASVGDRVTITCRASQ |
| | FTFSVYGMHWVRQAPGKGLEWVAVI | GVRNDFGWFQQKPGKAPKRLIYGAS |
| | WYDASNKDYAPSVKGRFTISRDNSKN | SLQSGVPSRFSGSGSGTEFTLTISSLQP |
| | TLYLQMNSLRAEDTAIYYCARPGEGD | EDFATYYCLQQNSYPWTFGQGTKLEI |
| | YWGQGTLVTVSS | K |
| CB21-499-091 | EVQLVESGGGVVQPGRSLRLSCAASG | DIQMTQSPSSLSASVGDRVTITCRASQ |
| | FTFSTYGMHWVRQAPGKGLEWVAVI | GVRNDFGWFQQKPGKAPKRLIYGAS |
| | WYDASNKDYAPSVKGRFTISRDNSKN | SLQSGVPSRFSGSGSGTEFTLTISSLQP |
| | TLYLQMNSLRAEDTAIYYCARPGEGD | EDFATYYCLQQNSYPWTFGQGTKLEI |
| | YWGQGTLVTVSS | K |
| CB21-499-092 | EVQLVESGGGVVQPGRSLRLSCAASG | DIQMTQSPSSLSASVGDRVTITCRASQ |
| | FTFSSYGMNWVRQAPGKGLEWVAVI | GVRNDFGWFQQKPGKAPKRLIYGAS |
| | WYDASNKDYAPSVKGRFTISRDNSKN | SLQSGVPSRFSGSGSGTEFTLTISSLQP |
| | TLYLQMNSLRAEDTAIYYCARPGEGD | EDFATYYCLQQNSYPWTFGQGTKLEI |
| | YWGQGTLVTVSS | K |
| CB21-499-093 | EVQLVESGGGVVQPGRSLRLSCAASG | DIQMTQSPSSLSASVGDRVTITCRASQ |
| | FTFSSYGMHWVRQAPGKGLEWVAII | GVRNDFGWFQQKPGKAPKRLIYGAS |
| | WYDASNKDYAPSVKGRFTISRDNSKN | SLQSGVPSRFSGSGSGTEFTLTISSLQP |
| | TLYLQMNSLRAEDTAIYYCARPGEGD | EDFATYYCLQQNSYPWTFGQGTKLEI |
| | YWGQGTLVTVSS | K |
| CB21-499-094 | EVQLVESGGGVVQPGRSLRLSCAASG | DIQMTQSPSSLSASVGDRVTITCRASQ |
| | FTFSSYGMHWVRQAPGKGLEWVAMI | GVRNDFGWFQQKPGKAPKRLIYGAS |
| | WYDASNKDYAPSVKGRFTISRDNSKN | SLQSGVPSRFSGSGSGTEFTLTISSLQP |
| | TLYLQMNSLRAEDTAIYYCARPGEGD | EDFATYYCLQQNSYPWTFGQGTKLEI |
| | YWGQGTLVTVSS | K |
| CB21-499-095 | EVQLVESGGGVVQPGRSLRLSCAASG | DIQMTQSPSSLSASVGDRVTITCRASQ |
| | FTFSSYGMHWVRQAPGKGLEWVARI | GVRNDFGWFQQKPGKAPKRLIYGAS |
| | WYDASNKDYAPSVKGRFTISRDNSKN | SLQSGVPSRFSGSGSGTEFTLTISSLQP |
| | TLYLQMNSLRAEDTAIYYCARPGEGD | EDFATYYCLQQNSYPWTFGQGTKLEI |
| | YWGQGTLVTVSS | K |
| CB21-499-096 | EVQLVESGGGVVQPGRSLRLSCAASG | DIQMTQSPSSLSASVGDRVTITCRASQ |
| | FTFSSYGMHWVRQAPGKGLEWVADI | GVRNDFGWFQQKPGKAPKRLIYGAS |
| | WYDASNKDYAPSVKGRFTISRDNSKN | SLQSGVPSRFSGSGSGTEFTLTISSLQP |
| | TLYLQMNSLRAEDTAIYYCARPGEGD | EDFATYYCLQQNSYPWTFGQGTKLEI |
| | YWGQGTLVTVSS | K |
| CB21-499-097 | EVQLVESGGGVVQPGRSLRLSCAASG | DIQMTQSPSSLSASVGDRVTITCRASQ |
| | FTFSSYGMHWVRQAPGKGLEWVAEI | GVRNDFGWFQQKPGKAPKRLIYGAS |
| | WYDASNKDYAPSVKGRFTISRDNSKN | SLQSGVPSRFSGSGSGTEFTLTISSLQP |
| | TLYLQMNSLRAEDTAIYYCARPGEGD | EDFATYYCLQQNSYPWTFGQGTKLEI |
| | YWGQGTLVTVSS | K |
| CB21-499-098 | EVQLVESGGGVVQPGRSLRLSCAASG | DIQMTQSPSSLSASVGDRVTITCRASQ |
| | FTFSSYGMHWVRQAPGKGLEWVAAI | GVRNDFGWFQQKPGKAPKRLIYGAS |
| | WYDASNKDYAPSVKGRFTISRDNSKN | SLQSGVPSRFSGSGSGTEFTLTISSLQP |
| | TLYLQMNSLRAEDTAIYYCARPGEGD | EDFATYYCLQQNSYPWTFGQGTKLEI |
| | YWGQGTLVTVSS | K |
| CB21-499-099 | EVQLVESGGGVVQPGRSLRLSCAASG | DIQMTQSPSSLSASVGDRVTITCRASQ |
| | FTFSSYGMHWVRQAPGKGLEWVAVI | GVRNDFGWFQQKPGKAPKRLIYGAS |
| | WYDASNKDYAPSVKGRFTISRDNSKN | SLQSGVPSRFSGSGSGTEFTLTISSLQP |
| | TLYLQMNGLRAEDTAIYYCARPGEGD | EDFATYYCLQQNSYPWTFGQGTKLEI |
| | YWGQGTLVTVSS | K |
| CB21-499-100 | EVQLVESGGGVVQPGRSLRLSCAASG | DIQMTQSPSSLSASVGDRVTITCRASQ |
| | FTFSSYGMHWVRQAPGKGLEWVAVI | GVRNDFGWFQQKPGKAPKRLIYGAS |
| | WYDASNKDYAPSVKGRFTISRDNSKN | SLQSGVPSRFSGSGSGTEFTLTISSLQP |
| | TLYLQMNRLRAEDTAIYYCARPGEGD | EDFATYYCLQQNSYPWTFGQGTKLEI |
| | YWGQGTLVTVSS | K |
| CB21-499-101 | EVQLVESGGGVVQPGRSLRLSCAASG | DIQMTQSPSSLSASVGDRVTITCRASQ |
| | FTFSSYGMHWVRQAPGKGLEWVAVI | GVRNDFGWFQQKPGKAPKRLIYGAS |
| | WYDASNKDYAPSVKGRFTISRDNSKN | SLQSGVPSRFSGSGSGTEFTLTISSLQP |
| | TLYLQMNSLRAEDTAIYYCARPGEGD | EDFATYYCLQQNSYPWTFGQGTKLEI |
| | YWGRGTLVTVSS | K |
| CB21-499-102 | EVQLVESGGGVVQPGRSLRLSCAASG | DIQMTQSPSSLSASVGDRVTITCRASQ |
| | FTFSSYGMHWVRQAPGKGLEWVAVI | GVRNDFGWFQQKPGKAPKRLIYGAS |
| | WYDASNKDYAPSVKGRFTISRDNSKN | SLQSGVPSRFSGSGSGTEFTLTISSLQP |
| | TLYLQMNSLRAEDTAIYYCARPGEGD | EDFATYYCLQQNSYPWTFGQGTKLEI |
| | YWGQGTTVTVSS | K |
| CB21-499-103 | EVQLVESGGGVVQPGRSLRLSCAASG | DIQMTQSPSSLSASVGDRVTITCRASQ |
| | FTFSSYGMHWVRQAPGKGLEWVAVI | GVRNDFGWFQQKPGKAPKRLIYGAS |
| | WYDASNKDYAPSVKGRFTISRDNSKN | SLQSGVPSRFSGSGSGTEFTLTISSLQP |
| | TLYLQMNSLRAEDTAIYYCARPGEGD | EDFATYYCLQQNSYPWTFGQGTKLEI |
| | YWGQGTMVTVSS | K |
| CB21-499-104 | EVQLVESGGGVVQPGRSLRLSCAASG | DIQMTQSPSSLSASVGDRVTITCRASQ |
| | FTFSSYGMHWVRDAPGKGLEWVAVI | GVRNDFGWFQKKPGKAPKRLIYGAS |
| | WYDASNKDYAPSVKGRFTISRDNSKN | SLQSGVPSRFSGSGSGTEFTLTISSLQP |
| | TLYLQMNSLRAEDTAIYYCARPGEGD | EDFATYYCLQQNSYPWTFGQGTKLEI |
| | YWGQGTLVTVSS | K |
| CB21-499-105 | EVQLVESGGGVVQPGRSLRLSCAASG | DIQMTQSPSSLSASVGDRVTITCRASQ |
| | FTFSSYGMHWVRKAPGKGLEWVAVI | GVRNDFGWFQDKPGKAPKRLIYGAS |
| | WYDASNKDYAPSVKGRFTISRDNSKN | SLQSGVPSRFSGSGSGTEFTLTISSLQP |
| | TLYLQMNSLRAEDTAIYYCARPGEGD | EDFATYYCLQQNSYPWTFGQGTKLEI |
| | YWGQGTLVTVSS | K |
| CB21-499-106 | EVQLVESGGGVVQPGRSLRLSCAASG | DIQMTQSPSSLSASVGDRVTITCRASQ |
| | FTFSSYGMHWVRCAPGKGLEWVAVI | GVRNDFGWFQCKPGKAPKRLIYGAS |
| | WYDASNKDYAPSVKGRFTISRDNSKN | SLQSGVPSRFSGSGSGTEFTLTISSLQP |
| | TLYLQMNSLRAEDTAIYYCARPGEGD | EDFATYYCLQQNSYPWTFGQGTKLEI |
| | YWGQGTLVTVSS | K |
| CB21-499-107 | EVQLVESGGGVVQPGRSLRLSCAASG | DIQMTQSPSSLSASVGDRVTITCRASQ |
| | FTFSSYGMHWVRQAPGKGLEWVAVI | GVRNDFGWFQQKPGKKPKRLIYGAS |
| | WYDASNKDYAPSVKGRFTISRDNSKN | SLQSGVPSRFSGSGSGTEFTLTISSLQP |
| | TLYLQMNSLRAEDTAIYYCARPGEGD | EDFATYYCLQQNSYPWTFGQGTKLEI |
| | YWDQGTLVTVSS | K |
| CB21-499-108 | EVQLVESGGGVVQPGRSLRLSCAASG | DIQMTQSPSSLSASVGDRVTITCRASQ |
| | FTFSSYGMHWVRQAPGKGLEWVAVI | GVRNDFGWFQQKPGKDPKRLIYGAS |
| | WYDASNKDYAPSVKGRFTISRDNSKN | SLQSGVPSRFSGSGSGTEFTLTISSLQP |
| | TLYLQMNSLRAEDTAIYYCARPGEGD | EDFATYYCLQQNSYPWTFGQGTKLEI |
| | YWKQGTLVTVSS | K |
| CB21-499-109 | EVQLVESGGGVVQPGRSLRLSCAASG | DIQMTQSPSSLSASVGDRVTITCRASQ |
| | FTFSSYGMHWVRQAPGKGLEWVAVI | GVRNDFGWFQQKPGKCPKRLIYGAS |
| | WYDASNKDYAPSVKGRFTISRDNSKN | SLQSGVPSRFSGSGSGTEFTLTISSLQP |
| | TLYLQMNSLRAEDTAIYYCARPGEGD | EDFATYYCLQQNSYPWTFGQGTKLEI |
| | YWCQGTLVTVSS | K |
| CB21-499-110 | EVQLVESGGGVVQPGRSLRLSCAASG | DIQMTQSPSSLSASVGDRVTITCRASQ |
| | FTFSSYGMHWVRQAPGKGLEWVAVI | GVRNDFGWFQQKPGKAPKRLIYGAS |
| | WYDASNKDYAPSVKGRFTISRDNSKN | SLQSGVPSRFSGSGSGTEFTLTISSLQP |
| | TLYLQMNSLRAEDTAIYYCARPGEGD | EDFATYYCLQKNSYPWTFGQGTKLEI |
| | YWGQGTLVTVSS | K |
| CB21-499-111 | EVQLVESGGGVVQPGRSLRLSCAASG | DIQMTQSPSSLSASVGDRVTITCRASQ |
| | FTFSSYGMHWVRQAPGKGLEWVAVI | GVRNDFGWFQQKPGKAPKRLIYGAS |
| | WYDASNKDYAPSVKGRFTISRDNSKN | SLQSGVPSRFSGSGSGTEFTLTISSLQP |
| | TLYLQMNSLRAEDTAIYYCARPGEGC | EDFATYYCLQCNSYPWTFGQGTKLEI |
| | YWGQGTLVTVSS | K |
| CB21-499-112 | EVQLVESGGGVVQPGRSLRLSCAASG | DIQMTQSPSSLSASVGDRVTITCRASQ |
| | FTFSSYGMHWVRQAPGKGLEWVDVI | GVRNDFGWFQQKPGKAPKRLIYGAS |
| | WYDASNKDYAPSVKGRFTKSRDNSK | SLQSGVPSRFSGSGSGTEFTLTISSLQP |
| | NTLYLQMNSLRAEDTAIYYCARPGEG | EDFATYYCLQQNSYPWTFGQGTKLEI |
| | DYWGQGTLVTVSS | K |
| CB21-499-113 | EVQLVESGGGVVQPGRSLRLSCAASG | DIQMTQSPSSLSASVGDRVTITCRASQ |
| | FTFSSYGMHWVRQAPGKGLEWVKVI | GVRNDFGWFQQKPGKAPKRLIYGAS |
| | WYDASNKDYAPSVKGRFTDSRDNSK | SLQSGVPSRFSGSGSGTEFTLTISSLQP |
| | NTLYLQMNSLRAEDTAIYYCARPGEG | EDFATYYCLQQNSYPWTFGQGTKLEI |
| | DYWGQGTLVTVSS | K |
| CB21-499-114 | EVQLVESGGGVVQPGRSLRLSCAASG | DIQMTQSPSSLSASVGDRVTITCRASQ |
| | FTFSDYGMHWVRQAPGKGLEWVAVI | GVRNDFGWFQQKPGKAPKRLIYGAS |
| | WYDASNKDYAPSVKGRFTISRDNSKN | SLQSGVPSRFSGSGSGTEFTLTISSLQP |
| | TLYLQMNSLRAEDTAIYYCARPGEGD | EDFATYYCLQQNSYPWTFGQGTKLEI |
| | YWGQGTLVTVSS | K |
| CB21-499-115 | EVQLVESGGGVVQPGRSLRLSCAASG | DIQMTQSPSSLSASVGDRVTITCRASQ |
| | FTFSSDGMHWVRQAPGKGLEWVAVI | GVRNDFGWFQQKPGKAPKRLIYGAS |
| | WYDASNKDYAPSVKGRFTISRDNSKN | SLQSGVPSRFSGSGSGTEFTLTISSLQP |
| | TLYLQMNSLRAEDTAIYYCARPGEGD | EDFATYYCLQQNSYPWTFGQGTKLEI |
| | YWGQGTLVTVSS | K |
| CB21-499-116 | EVQLVESGGGVVQPGRSLKLSCAASG | DIQMTQSPSSLSASVGDRVTITCRASQ |
| | FTFSSYGMHWVRQAPGKGLEWVAVI | GVRNDFGWFQQKPGKAPKRLIYGAS |
| | WYDASNKDYAPSVKGRFTISRDNSKN | SLQSGVPSRFSGSGSGTEFTLTISSLQP |
| | TLYLQMNSLRAEDTAIYYCARPGEGD | EDFATYYCLQQNSYPWTFGQGTKLEI |
| | YWGQGTLVTVSS | K |
| CB21-499-117 | EVQLVESGGGVVQPGRSLRLSCVASG | DIQMTQSPSSLSASVGDRVTITCRASQ |
| | FTFSSYGMHWVRQAPGKGLEWVAVI | GVRNDFGWFQQKPGKAPKRLIYGAS |
| | WYDASNKDYAPSVKGRFTISRDNSKN | SLQSGVPSRFSGSGSGTEFTLTISSLQP |
| | TLYLQMNSLRAEDTAIYYCARPGEGD | EDFATYYCLQQNSYPWTFGQGTKLEI |
| | YWGQGTLVTVSS | K |
| CB21-499-118 | EVQLVESGGGVVQPGRSLKLSCVASG | DIQMTQSPSSLSASVGDRVTITCRASQ |
| | FTFSSYGMHWVRQAPGKGLEWVAVI | GVRNDFGWFQQKPGKAPKRLIYGAS |
| | WYDASNKDYAPSVKGRFTISRDNSKN | SLQSGVPSRFSGSGSGTEFTLTISSLQP |
| | TLYLQMNSLRAEDTAIYYCARPGEGD | EDFATYYCLQQNSYPWTFGQGTKLEI |
| | YWGQGTLVTVSS | K |
| CB21-499-119 | EVQLVESGGGVVQPGRSLRLSCAASG | DIQMTQSPSSLSASVGDRVTITCRASQ |
| | FTFSSYGMHWVRQAPGKGLEWVCVI | GVRNDFGWFQQKPGKAPKRLIYGAS |
| | WYDASNKDYAPSVKGRFTCSRDNSK | SLQSGVPSRFSGSGSGTEFTLTISSLQP |
| | NTLYLQMNSLRAEDTAIYYCARPGEG | EDFATYYCLQQNSYPWTFGQGTKLEI |
| | DYWGQGTLVTVSS | K |
| CB21-499-120 | EVQLVESGGGVVQPGRSLKLSCVASG | DIQMTQSPSSLSASVGDRVTITCRASQ |
| | FTFSSYGMHWVRQAPGKGLEWVCVI | GVRNDFGWFQQKPGKAPKRLIYGAS |
| | WYDASNKDYAPSVKGRFTCSRDNSK | SLQSGVPSRFSGSGSGTEFTLTISSLQP |
| | NTLYLQMNSLRAEDTAIYYCARPGEG | EDFATYYCLQQNSYPWTFGQGTKLEI |
| | DYWGQGTLVTVSS | K |
| CB21-499-121 | EVQLVESGGGVVQPGRSLRLSCAASG | DIQMTQSPSSLSASVGDRVTITCRASQ |
| | FTFSSYGMHWVRQAPGKGLEWVAVI | GVRNDFGWFQQKPGKAPKRLIYGAS |
| | WYDASNKDYAPSVKGCFTISRDNSKN | SLQSGVPSRFSGSGSGTEFTLTISSLQP |
| | TLYLQMNSLRAECTAIYYCARPGEGD | EDFATYYCLQQNSYPWTFGQGTKLEI |
| | YWGQGTLVTVSS | K |
| CB21-499-122 | EVQLVESGGGVVQPGRSLRLSCAASG | DIQMTQSPSSLSASVGDRVTITCRASQ |
| | FTFSSYGMHWVRQAPGKGLEWVAVI | GVRNDFGWFQQKPGKAPKRLIYGAS |
| | WYDASNKDYAPSVKGRFTISRDNSKN | SLQSGVPSRFSGSGSGTEFTLTISSLQP |
| | TLYLQMNSLRAEDTAIYYCARPGECD | EDFATYYCLQQNSYPWTFGQGTKLEI |
| | YWGQGTLVTVSS | K |
| CB21-499-123 | EVQLVESGGGVVQPGRSLRLSCAASG | DIQMTQSPSSLSASVGDRVTITCRASQ |
| | FPFSSYGMHWVRQAPGKGLEWVAVI | GVRNDFGWFQQKPGKAPKRLIYGAS |
| | WYDASNKDYAPSVKGRFTISRDNSKN | SLQSGVPSRFSGSGSGTEFTLTISSLQP |
| | TLYLQMNSLRAEDTAIYYCARPGEGD | EDFATYYCLQQNSYPWTFGQGTKLEI |
| | YWGQGTLVTVSS | K |
| CB21-499-124 | EVQLVESGGGVVQPGRSLRLSCAASG | DIQMTQSPSSLSASVGDRVTITCRASQ |
| | FTFPSYGMHWVRQAPGKGLEWVAVI | GVRNDFGWFQQKPGKAPKRLIYGAS |
| | WYDASNKDYAPSVKGRFTISRDNSKN | SLQSGVPSRFSGSGSGTEFTLTISSLQP |
| | TLYLQMNSLRAEDTAIYYCARPGEGD | EDFATYYCLQQNSYPWTFGQGTKLEI |
| | YWGQGTLVTVSS | K |
| CB21-499-125 | EVQLVESGGGVVQPGRSLRLSCAASG | DIQMTQSPSSLSASVGDRVTITCRASQ |
| | FTFSPYGMHWVRQAPGKGLEWVAVI | GVRNDFGWFQQKPGKAPKRLIYGAS |
| | WYDASNKDYAPSVKGRFTISRDNSKN | SLQSGVPSRFSGSGSGTEFTLTISSLQP |
| | TLYLQMNSLRAEDTAIYYCARPGEGD | EDFATYYCLQQNSYPWTFGQGTKLEI |
| | YWGQGTLVTVSS | K |
| CB21-499-126 | EVQLVESGGGVVQPGRSLRLSCAASG | DIQMTQSPSSLSASVGDRVTITCRASQ |
| | FTFSSYPMHWVRQAPGKGLEWVAVI | GVRNDFGWFQQKPGKAPKRLIYGAS |
| | WYDASNKDYAPSVKGRFTISRDNSKN | SLQSGVPSRFSGSGSGTEFTLTISSLQP |
| | TLYLQMNSLRAEDTAIYYCARPGEGD | EDFATYYCLQQNSYPWTFGQGTKLEI |
| | YWGQGTLVTVSS | K |
| CB21-499-127 | EVQLVESGGGVVQPGRSLRLSCAASG | DIQMTQSPSSLSASVGDRVTITCRASQ |
| | FTFSSYGMHWVRQAPGKGLEWVAVI | GVRNDFGWFQQKPGKAPKRLIYGAS |
| | WYDAPNKDYAPSVKGRFTISRDNSKN | SLQSGVPSRFSGSGSGTEFTLTISSLQP |
| | TLYLQMNSLRAEDTAIYYCARPGEGD | EDFATYYCLQQNSYPWTFGQGTKLEI |
| | YWGQGTLVTVSS | K |
| CB21-499-128 | EVQLVESGGGVVQPGRSLRLSCAASG | DIQMTQSPSSLSASVGDRVTITCRASQ |
| | FTFSSYGMHWVRQAPGKGLEWVAVI | GVRNDFGWFQQKPGKAPKRLIYGAS |
| | SYDASNKDYAPSVKGRFTISRDNSKN | SLQSGVPSRFSGSGSGTEFTLTISSLQP |
| | TLYLQMNSLRAEDTAIYYCARPGEGD | EDFATYYCLQQNSYPWTFGQGTKLEI |
| | YWGQGTLVTVSS | K |
| CB21-499-129 | EVQLVESGGGVVQPGRSLRLSCAASG | DIQMTQSPSSLSASVGDRVTITCRASQ |
| | FTFSSYGMHWVRQAPGKGLEWVAVI | GVRNDFGWFQQKPGKAPKRLIYGAS |
| | NYDASNKDYAPSVKGRFTISRDNSKN | SLQSGVPSRFSGSGSGTEFTLTISSLQP |
| | TLYLQMNSLRAEDTAIYYCARPGEGD | EDFATYYCLQQNSYPWTFGQGTKLEI |
| | YWGQGTLVTVSS | K |
| CB21-499-130 | EVQLVESGGGVVQPGRSLRLSCAASG | DIQMTQSPSSLSASVGDRVTITCRASQ |
| | FTFSSYGMHWVRQAPGKGLEWVAVI | GVRNDFGWFQQKPGKAPKRLIYGAS |
| | DYDASNKDYAPSVKGRFTISRDNSKN | SLQSGVPSRFSGSGSGTEFTLTISSLQP |
| | TLYLQMNSLRAEDTAIYYCARPGEGD | EDFATYYCLQQNSYPWTFGQGTKLEI |
| | YWGQGTLVTVSS | K |
| CB21-499-131 | EVQLVESGGGVVQPGRSLRLSCAASG | DIQMTQSPSSLSASVGDRVTITCRASQ |
| | FTFSSYGMHWVRQAPGKGLEWVAVI | GVRNDFGWFQQKPGKAPKRLIYGAS |
| | RYDASNKDYAPSVKGRFTISRDNSKN | SLQSGVPSRFSGSGSGTEFTLTISSLQP |
| | TLYLQMNSLRAEDTAIYYCARPGEGD | EDFATYYCLQQNSYPWTFGQGTKLEI |
| | YWGQGTLVTVSS | K |
| CB21-499-132 | EVQLVESGGGVVQPGRSLRLSCAASG | DIQMTQSPSSLSASVGDRVTITCRASQ |
| | FTFSSYGMHWVRQAPGKGLEWVAVI | GVRNDFGWFQQKPGKAPKRLIYGAS |
| | KYDASNKDYAPSVKGRFTISRDNSKN | SLQSGVPSRFSGSGSGTEFTLTISSLQP |
| | TLYLQMNSLRAEDTAIYYCARPGEGD | EDFATYYCLQQNSYPWTFGQGTKLEI |
| | YWGQGTLVTVSS | K |
| CB21-499-133 | EVQLVESGGGVVQPGRSLRLSCAASG | DIQMTQSPSSLSASVGDRVTITCRASQ |
| | FTFSSYGMHWVRQAPGKGLEWVAVI | GVRNDFGWFQQKPGKAPKRLIYGAS |
| | AYDASNKDYAPSVKGRFTISRDNSKN | SLQSGVPSRFSGSGSGTEFTLTISSLQP |
| | TLYLQMNSLRAEDTAIYYCARPGEGD | EDFATYYCLQQNSYPWTFGQGTKLEI |
| | YWGQGTLVTVSS | K |
| CB21-499-134 | EVQLVESGGGVVQPGRSLRLSCAASG | DIQMTQSPSSLSASVGDRVTITCRASQ |
| | FTFSSYGMHWVRQAPGKGLEWVAVI | GVRNDFGWFQQKPGKAPKRLIYGAS |
| | WDDASNKDYAPSVKGRFTISRDNSKN | SLQSGVPSRFSGSGSGTEFTLTISSLQP |
| | TLYLQMNSLRAEDTAIYYCARPGEGD | EDFATYYCLQQNSYPWTFGQGTKLEI |
| | YWGQGTLVTVSS | K |
| CB21-499-135 | EVQLVESGGGVVQPGRSLRLSCAASG | DIQMTQSPSSLSASVGDRVTITCRASQ |
| | FTFSSYGMHWVRQAPGKGLEWVAVI | GVRNDFGWFQQKPGKAPKRLIYGAS |
| | WPDASNKDYAPSVKGRFTISRDNSKN | SLQSGVPSRFSGSGSGTEFTLTISSLQP |
| | TLYLQMNSLRAEDTAIYYCARPGEGD | EDFATYYCLQQNSYPWTFGQGTKLEI |
| | YWGQGTLVTVSS | K |
| CB21-499-136 | EVQLVESGGGVVQPGRSLRLSCAASG | DIQMTQSPSSLSASVGDRVTITCRASQ |
| | FTFSSYGMHWVRQAPGKGLEWVAVI | GVRNDFGWFQQKPGKAPKRLIYGAS |
| | WNDASNKDYAPSVKGRFTISRDNSKN | SLQSGVPSRFSGSGSGTEFTLTISSLQP |
| | TLYLQMNSLRAEDTAIYYCARPGEGD | EDFATYYCLQQNSYPWTFGQGTKLEI |
| | YWGQGTLVTVSS | K |
| CB21-499-137 | EVQLVESGGGVVQPGRSLRLSCAASG | DIQMTQSPSSLSASVGDRVTITCRASQ |
| | FTFSSYGMHWVRQAPGKGLEWVAVI | GVRNDFGWFQQKPGKAPKRLIYGAS |
| | WKDASNKDYAPSVKGRFTISRDNSKN | SLQSGVPSRFSGSGSGTEFTLTISSLQP |
| | TLYLQMNSLRAEDTAIYYCARPGEGD | EDFATYYCLQQNSYPWTFGQGTKLEI |
| | YWGQGTLVTVSS | K |
| CB21-499-138 | EVQLVESGGGVVQPGRSLRLSCAASG | DIQMTQSPSSLSASVGDRVTITCRASQ |
| | FTFSSYGMHWVRQAPGKGLEWVAVI | GVRNDFGWFQQKPGKAPKRLIYGAS |
| | WGDASNKDYAPSVKGRFTISRDNSKN | SLQSGVPSRFSGSGSGTEFTLTISSLQP |
| | TLYLQMNSLRAEDTAIYYCARPGEGD | EDFATYYCLQQNSYPWTFGQGTKLEI |
| | YWGQGTLVTVSS | K |
| CB21-499-139 | EVQLVESGGGVVQPGRSLRLSCAASG | DIQMTQSPSSLSASVGDRVTITCRASQ |
| | FTFSSYGMHWVRQAPGKGLEWVAVI | GVRNDFGWFQQKPGKAPKRLIYGAS |
| | WSDASNKDYAPSVKGRFTISRDNSKN | SLQSGVPSRFSGSGSGTEFTLTISSLQP |
| | TLYLQMNSLRAEDTAIYYCARPGEGD | EDFATYYCLQQNSYPWTFGQGTKLEI |
| | YWGQGTLVTVSS | K |
| CB21-499-140 | EVQLVESGGGVVQPGRSLRLSCAASG | DIQMTQSPSSLSASVGDRVTITCRASQ |
| | FTFSSYGMHWVRQAPGKGLEWVAVI | GVRNDFGWFQQKPGKAPKRLIYGAS |
| | WYDASNKDYAPSVKGRFTISRDNSKN | SLQSGVPSRFSGSGSGTEFTLTISSLQP |
| | TLYLQMNSLRAEDTAIYYCARPGEGD | EDFATYYCLQQNSYPWTFGQGTKLEI |
| | VWGQGTLVTVSS | K |
| CB21-499-141 | EVQLVESGGGVVQPGRSLRLSCAASG | DIQMTQSPSSLSASVGDRVTITCRASQ |
| | FTFSSYGMHWVRQAPGKGLEWVAVI | GVRNDFGWFQQKPGKAPKRLIYGAS |
| | WYDASNKDYAPSVKGRFTISRDNSKN | SLQSGVPSRFSGSGSGTEFTLTISSLQP |
| | TLYLQMNSLRAEDTAIYYCARPGEGD | EDFATYYCLQQNSYPWTFGQGTKLEI |
| | RWGQGTLVTVSS | K |
| CB21-499-142 | EVQLVESGGGVVQPGRSLRLSCAASG | DIQMTQSPSSLSASVGDRVTITCRASQ |
| | FTFSSYGMHWVRQAPGKGLEWVAVI | GVRNDFGWFQQKPGKAPKRLIYGAS |
| | WYDASNKDYAPSVKGRFTISRDNSKN | SLQSGVPSRFSGSGSGTEFTLTISSLQP |
| | TLYLQMNSLRAEDTAIYYCARPGEGD | EDFATYYCLQQNSYPWTFGQGTKLEI |
| | PWGQGTLVTVSS | K |
| CB21-499-143 | EVQLVESGGGVVQPGRSLRLSCAASG | DIQMTQSPSSLSASVGDRVTITCRASQ |
| | FTFSSYGMHWVRQAPGKGLEWVAVI | GVRNDFGWFQQKPGKAPKRLIYGAS |
| | WYDASNKDYAPSVKGRFTISRDNSKN | SLQSGVPSRFSGSGSGTEFTLTISSLQP |
| | TLYLQMNSLRAEDTAIYYCARPGEGD | EDFATYYCLQQNSYPWTFGQGTKLEI |
| | AWGQGTLVTVSS | K |
| CB21-499-144 | EVQLVESGGGVVQPGRSLRLSCAASG | DIQMTQSPSSLSASVGDRVTITCRASQ |
| | FTFSSYGMHWVRQAPGKGLEWVAVI | GVRNDFGWFQQKPGKAPKRLIYGDS |
| | WYDASNKDYAPSVKGRFTISRDNSKN | SLQSGVPSRFSGSGSGTEFTLTISSLQP |
| | TLYLQMNSLRAEDTAIYYCARPGEGD | EDFATYYCLQQNSYPWTFGQGTKLEI |
| | YWGQGTLVTVSS | K |
| CB21-499-145 | EVQLVESGGGVVQPGRSLRLSCAASG | DIQMTQSPSSLSASVGDRVTITCRASQ |
| | FTFSSYGMHWVRQAPGKGLEWVAVI | GVRNDFGWFQQKPGKAPKRLIYGAD |
| | WYDASNKDYAPSVKGRFTISRDNSKN | SLQSGVPSRFSGSGSGTEFTLTISSLQP |
| | TLYLQMNSLRAEDTAIYYCARPGEGD | EDFATYYCLQQNSYPWTFGQGTKLEI |
| | YWGQGTLVTVSS | K |
| CB21-499-146 | EVQLVESGGGVVQPGRSLRLSCAASG | DIQMTQSPSSLSASVGDRVTITCRASQ |
| | FTFSSYGMHWVRQAPGKGLEWVAVI | GVRNDFGWFQQKPGKAPKRLIYGDD |
| | WYDASNKDYAPSVKGRFTISRDNSKN | SLQSGVPSRFSGSGSGTEFTLTISSLQP |
| | TLYLQMNSLRAEDTAIYYCARPGEGD | EDFATYYCLQQNSYPWTFGQGTKLEI |
| | YWGQGTLVTVSS | K |
| CB21-499-147 | EVQLVESGGGVVQPGRSLRLSCAASG | DIQMTQSPSSLSASVGDRVTITCRASQ |
| | FTFSSYGMHWVRQAPGKGLEWVAVI | GVRNDFGWYQQKPGKAPKRLIYGAS |
| | WYDASNKDYAPSVKGRFTISRDNSKN | SLQSGVPSRFSGSGSGTEFTLTISSLQP |
| | TLYLQMNSLRAEDTAIYYCARPGEGD | EDFATYYCLQQNSYPWTFGQGTKLEI |
| | YWGQGTLVTVSS | K |
| CB21-499-148 | EVQLVESGGGVVQPGRSLRLSCAASG | DIQMTQSPSSLSASVGDRVTITCRASQ |
| | FTFSSYGMHWVRQAPGKGLEWVAVI | GVRNDFGWFQQKPGKAPKRLIYAASS |
| | WYDASNKDYAPSVKGRFTISRDNSKN | LQSGVPSRFSGSGSGTEFTLTISSLQPE |
| | TLYLQMNSLRAEDTAIYYCARPGEGD | DFATYYCLQQNSYPWTFGQGTKLEIK |
| | YWGQGTLVTVSS | |
| CB21-499-149 | EVQLVESGGGVVQPGRSLRLSCAASG | DIQMTQSPSSLSASVGDRVTITCRASQ |
| | FTFSSYGMHWVRQAPGKGLEWVAVI | GVRNDFGWFQQKPGKAPKRLCYGAS |
| | WYDASNKDYAPSVKGRFTISRDNSKN | SLQSGVPSRFSCSGSGTEFTLTISSLQP |
| | TLYLQMNSLRAEDTAIYYCARPGEGD | EDFATYYCLQQNSYPWTFGQGTKLEI |
| | YWGQGTLVTVSS | K |
| CB21-499-150 | EVQLVESGGGVVQPGRSLRLSCAASG | DIQMTQSPSSLSASVGDRVTITCRASQ |
| | FTFSSYGMHWVRQAPGKGLEWVAVI | GVRNDFGWFQQKPGKAPKRLDYGAS |
| | WYDASNKDYAPSVKGRFTISRDNSKN | SLQSGVPSRFSKSGSGTEFTLTISSLQP |
| | TLYLQMNSLRAEDTAIYYCARPGEGD | EDFATYYCLQQNSYPWTFGQGTKLEI |
| | YWGQGTLVTVSS | K |
| CB21-499-151 | EVQLVESGGGVVQPGRSLRLSCAASG | DIQMTQSPSSLSASVGDRVTITCRASQ |
| | FTFSSYGMHWVRQAPGKGLEWVAVI | GVRNDFGWFQQKPGKAPKRLKYGAS |
| | WYDASNKDYAPSVKGRFTISRDNSKN | SLQSGVPSRFSDSGSGTEFTLTISSLQP |
| | TLYLQMNSLRAEDTAIYYCARPGEGD | EDFATYYCLQQNSYPWTFGQGTKLEI |
| | YWGQGTLVTVSS | K |
| CB21-499-152 | EVQLVESGGGVVQPGRSLRLSCAASG | DIQMTQSPSSLSASVGDRVTITCRASQ |
| | FTFSSYGMHWVRQAPGKGLEWVAVI | GVRNDFGWFQQKPGKAPKRLIYGAS |
| | WYDASNKDYAPSVKGRFTISRDNSKN | SLCSGVPSRFSGSGSGTEFTLTISSLQP |
| | TLYLQMNSLRAEDTAIYYCARPGEGD | EDFATYYCLQQNSYPWTFGQGTKLEI |
| | YWGQGTLVTVSS | K |
| CB21-499-153 | EVQLVESGGGVVQPGRSLRLSCAASG | DIQMTQSPSSLSASVGDRVTITCRASQ |
| | FTFSSYGMHWVRQAPGKGLEWVAVI | GVRNDFGWFQQKPGKAPKRLIYDAS |
| | WYDASNKDYAPSVKGRFTISRDNSKN | SLQSGVPSRFSGSGSGTEFTLTISSLQP |
| | TLYLQMNSLRAEDTAIYYCARPGEGD | EDFATYYCLQQNSYPWTFGQGTKLEI |
| | YWGQGTLVTVSS | K |
| CB21-499-154 | EVQLVESGGGVVQPGRSLRLSCAASG | DIQMTQSPSSLSASVGDRVTITCRASQ |
| | FTFSSYGMHWVRQAPGKGLEWVAVI | GVRNDFGWFQQKPGKAPKRLIYEASS |
| | WYDASNKDYAPSVKGRFTISRDNSKN | LQSGVPSRFSGSGSGTEFTLTISSLQPE |
| | TLYLQMNSLRAEDTAIYYCARPGEGD | DFATYYCLQQNSYPWTFGQGTKLEIK |
| | YWGQGTLVTVSS | |
| CB21-499-155 | EVQLVESGGGVVQPGRSLRLSCAASG | DIQMTQSPSSLSASVGDRVTITCRASQ |
| | FTFSSYGMHWVRQAPGKGLEWVAVI | GVRNDFGWFQQKPGKAPKRLIYKAS |
| | WYDASNKDYAPSVKGRFTISRDNSKN | SLQSGVPSRFSGSGSGTEFTLTISSLQP |
| | TLYLQMNSLRAEDTAIYYCARPGEGD | EDFATYYCLQQNSYPWTFGQGTKLEI |
| | YWGQGTLVTVSS | K |
| CB21-499-156 | EVQLVESGGGVVQPGRSLRLSCAASG | DIQMTQSPSSLSASVGDRVTITCRASQ |
| | FTFSSYGMHWVRQAPGKGLEWVAVI | GVRNDFGWFQQKPGKAPKRLIYLASS |
| | WYDASNKDYAPSVKGRFTISRDNSKN | LQSGVPSRFSGSGSGTEFTLTISSLQPE |
| | TLYLQMNSLRAEDTAIYYCARPGEGD | DFATYYCLQQNSYPWTFGQGTKLEIK |
| | YWGQGTLVTVSS | |
| CB21-499-157 | EVQLVESGGGVVQPGRSLRLSCAASG | DIQMTQSPSSLSASVGDRVTITCRASQ |
| | FTFSSYGMHWVRQAPGKGLEWVAVI | GVRNDFGWFQQKPGKAPKRLIYSASS |
| | WYDASNKDYAPSVKGRFTISRDNSKN | LQSGVPSRFSGSGSGTEFTLTISSLQPE |
| | TLYLQMNSLRAEDTAIYYCARPGEGD | DFATYYCLQQNSYPWTFGQGTKLEIK |
| | YWGQGTLVTVSS | |
| CB21-499-158 | EVQLVESGGGVVQPGRSLRLSCAASG | DIQMTQSPSSLSASVGDRVTITCRASQ |
| | FTFSSYGMHWVRQAPGKGLEWVAVI | GVRNDFGWFQQKPGKAPKRLIYGVS |
| | WYDASNKDYAPSVKGRFTISRDNSKN | SLQSGVPSRFSGSGSGTEFTLTISSLQP |
| | TLYLQMNSLRAEDTAIYYCARPGEGD | EDFATYYCLQQNSYPWTFGQGTKLEI |
| | YWGQGTLVTVSS | K |
| CB21-499-159 | EVQLVESGGGVVQPGRSLRLSCAASG | DIQMTQSPSSLSASVGDRVTITCRASQ |
| | FTFSSYGMHWVRQAPGKGLEWVAVI | GVRNDFGWFQQKPGKAPKRLIYGESS |
| | WYDASNKDYAPSVKGRFTISRDNSKN | LQSGVPSRFSGSGSGTEFTLTISSLQPE |
| | TLYLQMNSLRAEDTAIYYCARPGEGD | DFATYYCLQQNSYPWTFGQGTKLEIK |
| | YWGQGTLVTVSS | |
| CB21-499-160 | EVQLVESGGGVVQPGRSLRLSCAASG | DIQMTQSPSSLSASVGDRVTITCRASQ |
| | FTFSSYGMHWVRQAPGKGLEWVAVI | GVRNDFGWFQQKPGKAPKRLIYGPSS |
| | WYDASNKDYAPSVKGRFTISRDNSKN | LQSGVPSRFSGSGSGTEFTLTISSLQPE |
| | TLYLQMNSLRAEDTAIYYCARPGEGD | DFATYYCLQQNSYPWTFGQGTKLEIK |
| | YWGQGTLVTVSS | |
| CB21-499-161 | EVQLVESGGGVVQPGRSLRLSCAASG | DIQMTQSPSSLSASVGDRVTITCRASQ |
| | FTFSSYGMHWVRQAPGKGLEWVAVI | GVRNDFGWFQQKPGKAPKRLIYGAT |
| | WYDASNKDYAPSVKGRFTISRDNSKN | SLQSGVPSRFSGSGSGTEFTLTISSLQP |
| | TLYLQMNSLRAEDTAIYYCARPGEGD | EDFATYYCLQQNSYPWTFGQGTKLEI |
| | YWGQGTLVTVSS | K |
| CB21-499-162 | EVQLVESGGGVVQPGRSLRLSCAASG | DIQMTQSPSSLSASVGDRVTITCRASQ |
| | FTFSSYGMHWVRQAPGKGLEWVAVI | GVRNDFGWFQQKPGKAPKRLIYGAP |
| | WYDASNKDYAPSVKGRFTISRDNSKN | SLQSGVPSRFSGSGSGTEFTLTISSLQP |
| | TLYLQMNSLRAEDTAIYYCARPGEGD | EDFATYYCLQQNSYPWTFGQGTKLEI |
| | YWGQGTLVTVSS | K |
| CB21-499-163 | EVQLVESGGGVVQPGRSLRLSCAASG | DIQMTQSPSSLSASVGDRVTITCRASQ |
| | FTFSSYGMHWVRQAPGKGLEWVAVI | GVRNDFGWFQQKPGKAPKRLIYGAS |
| | WYDASNKDYAPSVKGRFTISRDNSKN | RLQSGVPSRFSGSGSGTEFTLTISSLQP |
| | TLYLQMNSLRAEDTAIYYCARPGEGD | EDFATYYCLQQNSYPWTFGQGTKLEI |
| | YWGQGTLVTVSS | K |
| CB21-499-164 | EVQLVESGGGVVQPGRSLRLSCAASG | DIQMTQSPSSLSASVGDRVTITCRASQ |
| | FTFSSYGMHWVRQAPGKGLEWVAVI | GVRNDFGWFQQKPGKAPKRLIYGAS |
| | WYDASNKDYAPSVKGRFTISRDNSKN | KLQSGVPSRFSGSGSGTEFTLTISSLQP |
| | TLYLQMNSLRAEDTAIYYCARPGEGD | EDFATYYCLQQNSYPWTFGQGTKLEI |
| | YWGQGTLVTVSS | K |
| CB21-499-165 | EVQLVESGGGVVQPGRSLRLSCAASG | DIQMTQSPSSLSASVGDRVTITCRASQ |
| | FTFSSYGMHWVRQAPGKGLEWVAVI | GVRNDFGWFQQKPGKAPKRLIYGAS |
| | WYDASNKDYAPSVKGRFTISRDNSKN | DLQSGVPSRFSGSGSGTEFTLTISSLQP |
| | TLYLQMNSLRAEDTAIYYCARPGEGD | EDFATYYCLQQNSYPWTFGQGTKLEI |
| | YWGQGTLVTVSS | K |
| CB21-499-166 | EVQLVESGGGVVQPGRSLRLSCAASG | DIQMTQSPSSLSASVGDRVTITCRASQ |
| | FTFSSYGMHWVRQAPGKGLEWVAVI | GVRNDFGWFQQKPGKAPKRLIYGASI |
| | WYDASNKDYAPSVKGRFTISRDNSKN | LQSGVPSRFSGSGSGTEFTLTISSLQPE |
| | TLYLQMNSLRAEDTAIYYCARPGEGD | DFATYYCLQQNSYPWTFGQGTKLEIK |
| | YWGQGTLVTVSS | |
| CB21-499-167 | EVQLVESGGGVVQPGRSLRLSCAASG | DIQMTQSPSSLSASVGDRVTITCRASQ |
| | FTFSSYGMHWVRQAPGKGLEWVAVI | GVRNDFGWFQQKPGKAPKRLIYGAS |
| | WYDASNKDYAPSVKGRFTISRDNSKN | LLQSGVPSRFSGSGSGTEFTLTISSLQP |
| | TLYLQMNSLRAEDTAIYYCARPGEGD | EDFATYYCLQQNSYPWTFGQGTKLEI |
| | YWGQGTLVTVSS | K |
| CB21-499-168 | EVQLVESGGGVVQPGRSLRLSCAASG | DIQMTQSPSSLSASVGDRVTITCRASQ |
| | FTFSSYGMHWVRQAPGKGLEWVAVI | GVRNDFGWFQQKPGKAPKRLIYGAS |
| | WYDASNKDYAPSVKGRFTISRDNSKN | SRQSGVPSRFSGSGSGTEFTLTISSLQP |
| | TLYLQMNSLRAEDTAIYYCARPGEGD | EDFATYYCLQQNSYPWTFGQGTKLEI |
| | YWGQGTLVTVSS | K |
| CB21-499-169 | EVQLVESGGGVVQPGRSLRLSCAASG | DIQMTQSPSSLSASVGDRVTITCRASQ |
| | FTFSSYGMHWVRQAPGKGLEWVAVI | GVRNDFGWFQQKPGKAPKRLIYGAS |
| | WYDASNKDYAPSVKGRFTISRDNSKN | SPQSGVPSRFSGSGSGTEFTLTISSLQP |
| | TLYLQMNSLRAEDTAIYYCARPGEGD | EDFATYYCLQQNSYPWTFGQGTKLEI |
| | YWGQGTLVTVSS | K |
| CB21-499-170 | EVQLVESGGGVVQPGRSLRLSCAASG | DIQMTQSPSSLSASVGDRVTITCRASQ |
| | FTFSSYGMHWVRQAPGKGLEWVAVI | GVRNDFGWFQQKPGKAPKRLIYGAS |
| | WYDASNKDYAPSVKGRFTISRDNSKN | SLPSGVPSRFSGSGSGTEFTLTISSLQP |
| | TLYLQMNSLRAEDTAIYYCARPGEGD | EDFATYYCLQQNSYPWTFGQGTKLEI |
| | YWGQGTLVTVSS | K |
| CB21-499-171 | EVQLVESGGGVVQPGRSLRLSCAASG | DIQMTQSPSSLSASVGDRVTITCRASQ |
| | FTFSSYGMHWVRQAPGKGLEWVAVI | GVRNDFGWFQQKPGKAPKRLIYGAS |
| | WYDASNKDYAPSVKGRFTISRDNSKN | SLASGVPSRFSGSGSGTEFTLTISSLQP |
| | TLYLQMNSLRAEDTAIYYCARPGEGD | EDFATYYCLQQNSYPWTFGQGTKLEI |
| | YWGQGTLVTVSS | K |
| CB21-499-172 | EVQLVESGGGVVQPGRSLRLSCAASG | DIQMTQSPSSLSASVGDRVTITCRASQ |
| | FTFSSYGMHWVRQAPGKGLEWVAVI | GVRNDFGWFQQKPGKAPKRLIYGAS |
| | WYDASNKDYAPSVKGRFTISRDNSKN | SLESGVPSRFSGSGSGTEFTLTISSLQP |
| | TLYLQMNSLRAEDTAIYYCARPGEGD | EDFATYYCLQQNSYPWTFGQGTKLEI |
| | YWGQGTLVTVSS | K |
| CB21-499-174 | EVQLVESGGGVVQPGRSLRLSCAASG | DIQMTQSPSSLSASVGDRVTITCRASQ |
| | FTFSSYGMHWVRQAPGKGLEWVAVI | GIRNDLGWYQQKPGKAPKRLIYAASS |
| | WYDASNKDYAPSVKGRFTISRDNSKN | LQSGVPSRFSGSGSGTEFTLTISSLQPE |
| | TLYLQMNSLRAEDTAIYYCARPGEGD | DFATYYCLQHNSYPWTFGQGTKVEIK |
| | YWGQGTLVTVSS | |
| CB21-499-175 | EVQLVESGGGVVQPGRSLRLSCAASG | EIVLTQSPATLSLSPGERATLSCRASQS |
| | FTFSSYGMHWVRQAPGKGLEWVAVI | VSSYLAWYQQKPGQAPRLLIYDASNR |
| | WYDASNKDYAPSVKGRFTISRDNSKN | ATGIPARFSGSGSGTDFTLTISSLEPEDF |
| | TLYLQMNSLRAEDTAIYYCARPGEGD | AVYYCQQRSNWPYTFGQGTKLEIK |
| | YWGQGTLVTVSS | |
| CB21-499-176 | EVQLVESGGGVVQPGRSLRLSCAASG | DIQMTQSPSSLSASVGDRVTITCRASQ |
| | FTFSSYGMHWVRQAPGKGLEWVAVI | SISSYLNWYQQKPGKAPKLLIYAASSL |
| | WYDASNKDYAPSVKGRFTISRDNSKN | QSGVPSRFSGSGSGTDFTLTISSLQPED |
| | TLYLQMNSLRAEDTAIYYCARPGEGD | FATYYCQQSYSTPFTFGPGTKVDIK |
| | YWGQGTLVTVSS | |
| CB21-499-177 | EVQLVESGGGVVQPGRSLRLSCAASG | DIQMTQSPSSLSASVGDRVTITCRASQ |
| | FTFSSYGMHWVRQAPGKGLEWVAVI | GVRNDFGWFQQKPGKAPKRLIYGAS |
| | WYDASNKEYAPSVKGRFTISRDNSKN | SLQSGVPSRFSGSGSGTEFTLTISSLQP |
| | TLYLQMNSLRAEDTAIYYCARPGEGD | EDFATYYCLQQNSYPWTFGQGTKLEI |
| | YWGQGTLVTVSS | K |
| CB21-499-178 | EVQLVESGGGVVQPGRSLRLSCAASG | DIQMTQSPSSLSASVGDRVTITCRASQ |
| | FTFSSYGMHWVRQAPGKGLEWVAVI | GIRNDFGWYQQKPGKAPKRLIYGASS |
| | WYDASNKEYAPSVKGRFTISRDNSKN | LQSGVPSRFSGSGSGTEFTLTISSLQPE |
| | TLYLQMNSLRAEDTAIYYCARPGEGD | DFATYYCLQQNSYPWTFGQGTKVEIK |
| | YWGQGTLVTVSS | |
| CB21-499-179 | EVQLVESGGGVVQPGRSLRLSCAASG | DIQMTQSPSSLSASVGDRVTITCRASQ |
| | FTFSSYGMHWVRQAPGKGLEWVAVI | GIRNDFGWYQQKPGKAPKRLIYGASS |
| | WYDASNKDYAPSVKGRFTISRDNSKN | LQSGVPSRFSGSGSGTEFTLTISSLQPE |
| | TLYLQMNSLRAEDTAIYYCARPGEGD | DFATYYCLQQNSYPWTFGQGTKVEIK |
| | YWGQGTLVTVSS | |

[0011] In certain embodiments, the hLY6G6D binding protein is an antibody. The term “antibody” as used herein is used in the broadest sense and specifically covers, but is not limited to, monoclonal antibodies (including full length monoclonal antibodies) and multispecific antibodies (e.g., bispecific antibodies) such as based on the Duobody® technology (Genmab) or Hexabody® technology (Genmab), antibody fragments, and artificial constructs such as single-chain variable fragments (scFvs) that comprise immunoglobulin variable regions.

[0012] “Antibody fragment” and “antibody binding fragment” mean antigen-binding fragments and analogues of an antibody, typically including at least a portion of the antigen binding or variable regions (e.g. one or more CDRs) of the parental antibody. An antibody fragment retains at least some of the binding specificity of the parental antibody. Typically, an antibody fragment retains at least 10% of the parental binding activity when that activity is expressed on a molar basis. Preferably, an antibody fragment retains at least 20%, 50%, 70%, 80%, 90%, 95% or 100% or more of the parental antibody's binding affinity for the target. Examples of antibody fragments include, but are not limited to, Fab, Fab′, F(ab′)2, and Fv fragments; diabodies; linear antibodies; single-chain antibody molecules, e.g., sc-Fv, unibodies (technology from Genmab); nanobodies (technology from Ablynx); domain antibodies (technology from Domantis); and multispecific antibodies formed from antibody fragments. Engineered antibody variants are reviewed in Holliger and Hudson, 2005, Nat. Biotechnol. 23:1126-1136.

[0013] In certain embodiments, an hLY6G6D binding protein of the invention is a T cell engaging antibody (e.g., a bispecific T cell engaging antibody, or BiTE® (Micromet)), a pro-Bispecific T Cell Engager (pro-BiTE) molecule, pro-Chimeric Antigen Receptor (pro-CAR) modified T cell, or other engineered receptor or other immune effector cell, such as a CAR modified NK cell, at least one arm of which binds hLY6G6D. T cell engagers are multivalent molecules that typically bind to both a tumor associated antigen and to CD3 on the surface of CD3+ T cells, thereby bridging the two cell types. Alternative multispecifics directed to tumor antigens can bridge to cell surface receptors such as CD16, γδ TCR, CTLA-4, PD-1, PD-L1, and 4-1BB, etc., or can bridge to cytokines such as IL-13, IL-4, VEGF, etc. Preferably, an antibody of the invention is a multispecific antibody, and most preferably a BiTE, which acts through the simultaneous engagement of hLY6G6D and CD3, resulting in the activation of T-cells irrespective of MHC.

[0014] An “Fab fragment” is comprised of one light chain and the C_{H}1 and variable regions of one heavy chain. The heavy chain of a Fab molecule cannot form a disulfide bond with another heavy chain molecule.

[0015] An “Fc” region contains two heavy chain fragments comprising the C_{H}1 and C_{H}2 domains of an antibody. The two heavy chain fragments are held together by two or more disulfide bonds and by hydrophobic interactions of the C_{H}3 domains.

[0016] An “Fab′ fragment” contains one light chain and a portion of one heavy chain that contains the V_{H} domain and the C_{H}1 domain and also the region between the C_{H}1 and C_{H}2 domains, such that an interchain disulfide bond can be formed between the two heavy chains of two Fab′ fragments to form a F(ab′)₂ molecule.

[0017] An “F(ab′)₂ fragment” contains two light chains and two heavy chains containing a portion of the constant region between the C_{H}1 and C_{H}2 domains, such that an interchain disulfide bond is formed between the two heavy chains. A F(ab′)₂ fragment thus is composed of two Fab′ fragments that are held together by a disulfide bond between the two heavy chains.

[0018] The “Fv region” comprises the variable regions from both the heavy and light chains, but lacks the constant regions.

[0019] A “single-chain Fv antibody” (or “scFv antibody”) refers to antibody fragments comprising the V_{H} and V_{L} domains of an antibody, wherein these domains are present in a single polypeptide chain. Generally, the Fv polypeptide further comprises a polypeptide linker between the V_{H} and V_{L} domains which enables the scFv to form the desired structure for antigen binding. For a review of scFv, see Pluckthun, 1994, The Pharmacology of Monoclonal Antibodies, vol. 113, Rosenburg and Moore eds. Springer-Verlag, New York, pp. 269-315. See also, International Patent Application Publication No. WO 88/01649 and U.S. Pat. Nos. 4,946,778 and 5,260,203.

[0020] A “diabody” is a small antibody fragment with two antigen-binding sites. The fragments comprise a heavy chain variable domain (V_{H}) connected to a light chain variable domain (V_{L}) in the same polypeptide chain (V_{H}-V_{L} or V_{L}-V_{H}). By using a linker that is too short to allow pairing between the two domains on the same chain, the domains are forced to pair with the complementary domains of another chain and create two antigen-binding sites. Diabodies are described more fully in, e.g., EP 404,097; WO 93/11161; and Holliger et al., 1993, Proc. Natl. Acad. Sci. USA 90:6444-6448.

[0021] A “Duobody®” (Genmab) is a bispecific antibody with normal IgG structures (Labrijn et al., 2013, Proc. Natl. Acad. Sci. USA 110 (13): 5145-5150).

[0022] “Hexabodies” are antibodies that, while retaining regular structure and specificity, have an increased killing ability (Diebolder et al., 2014, Science 343 (6176): 1260-3).

[0023] A “domain antibody fragment” is an immunologically functional immunoglobulin fragment containing only the variable region of a heavy chain or the variable region of a light chain. In some instances, two or more VH regions are covalently joined with a peptide linker to create a bivalent domain antibody fragment. The two VH regions of a bivalent domain antibody fragment may target the same or different antigens.

[0024] In certain embodiments, the hLY6G6D binding protein is a single chain variable fragment (scFv), a BiTE®, a (SCFV) 2, a NANOBODY®, a nanobody-HSA VHH-scAb, a VHH-Fab, a Dual scFab, a F(ab′)2, a diabody, a CROSSMAB®, a DAF (two-in-one), a DAE (four-in-one), a DUTAMAB®, a DT-TgG, a knobs-in-holes common light chain, a knobs-in-holes assembly, a charge pair, a Fab-arm exchange, a SEEDbody, a LUZ-Y, a FcAb, a kl-body, an orthogonal Fab, a DVD-IgG, a IgG (H)-scFv, a scFv-(H) IgG, IgG (L)-scFv, scFv-(L) IgG, IgG (L,H)-Fv, IgG (H)-V, V(H)-IgG, IgG (L)-V, V(L)-IgG, KIH IgG-scFab, 2scFv-IgG, IgG-2scFv, scFv4-Ig, ZYBODY™, DVI-IgG, Diabody-CH3, a triple body, a miniantibody, a minibody, a TriBi minibody, scFv-CH3 KIH, Fab-scFv, a F(ab′)2-scFv2, a scFv-KIH, a Fab-scFv-Fc, a tetravalent HCAb, a scDiabody-Fc, a Diabody-Fc, a tandem scFv-Fc, a VHH-Fc, a tandem VHH-Fc, a LTIH-Fc KiH, a Fab-VHH-Fc, an Intrabody, a dock and lock, an ImmTAC® (immune-mobilizing monoclonal TCRs (T cell receptors) against cancer), an IgG-IgG conjugate, a Cov-X-Body, a scFv1-PEG-scFv2, an Adnectin, a DARPin, or a fibronectin, an IgG, an IgM, an IgA, an IgE, an IgD, or a DEP conjugate, TMEAbody™, SAFEbody®, TRITAC®, a dual affinity retargeting (DART®) bispecific antibody, a simultaneous multiple interaction T-cell engagers (SMITE), or a SHIELD.

[0025] In some embodiments, the hLY6G6D binding protein is or comprises an IgG, IgM, IgA, IgE, or IgD antibody or fragment thereof. In some embodiments, the target binding protein is an IgG1, IgG2, IgG3, or IgG4 antibody. In some embodiments, the target binding protein is humanized.

[0026] An antibody fragment of the invention may comprise a sufficient portion of the constant region to permit dimerization (or multimerization) of heavy chains that have reduced disulfide linkage capability, for example where at least one of the hinge cysteines normally involved in inter-heavy chain disulfide linkage is altered as described herein. In another embodiment, an antibody fragment, for example one that comprises the Fc region, retains at least one of the biological functions normally associated with the Fc region when present in an intact antibody, such as FcRn binding, antibody half life modulation, ADCC (antibody dependent cellular cytotoxicity) function, and/or complement binding (for example, where the antibody has a glycosylation profile necessary for ADCC function or complement binding).

[0027] The hLY6G6D binding protein of the present invention also includes antibodies with modified (or blocked) Fc regions to provide altered effector functions. See, e.g. U.S. Pat. No. 5,624,821; WO2003/086310; WO2005/120571; WO2006/0057702; Presta, 2006, Adv. Drug Delivery Rev. 58:640-656. Such modification can be used to enhance or suppress various reactions of the immune system, with possible beneficial effects in diagnosis and therapy. Alterations of the Fc region include amino acid changes (substitutions, deletions and insertions), glycosylation or deglycosylation, and adding multiple Fc. Changes to the Fc can also alter the half-life of antibodies in therapeutic antibodies, and a longer half-life would result in less frequent dosing, with the concomitant increased convenience and decreased use of material. See Presta, 2005, J. Allergy Clin. Immunol. 116:731 at 734-35. In certain embodiments, the target binding protein of the present invention is a hLY6G6D/CD3 BiTE in an IgG1 format with reduced or absent effector functions relative to an unmodified IgG1.

[0028] The hLY6G6D binding proteins of the present invention also include antibodies with intact Fc regions that provide full effector functions, e.g. antibodies of isotype IgG1, which induce complement-dependent cytotoxicity (CDC) or antibody dependent cellular cytotoxicity (ADCC) in a targeted cell.

[0029] In some embodiments, the hLY6G6D binding protein is a hLY6G6D/CD3 BiTE that further comprises a masking moiety that inhibits binding of the target binding protein to CD3 in an inactive state. In some embodiments, the masking moiety is coupled to the target binding protein via a cleavable moiety (either directly or indirectly, e.g., via one or more linkers), and the cleavable moiety is a substrate for a protease. In some embodiments, the protease is ADAMS, AD AMTS, ADAM8, ADAM9, ADAM10, ADAM12, ADAM15, ADAM17/TACE, ADAMDEC1, ADAMTS1, ADAMTS4, ADAMTS5, Aspartate proteases, BACE, Renin, Aspartic cathepsins, Cathepsin D, Cathepsin E, Caspases, Caspase 1, Caspase 2, Caspase 3, Caspase 4, Caspase 5, Caspase 6, Caspase 7, Caspase 8, Caspase 9, Caspase 10, Caspase 14, Cysteine cathepsins, Cathepsin B, Cathepsin C, Cathepsin K, Cathepsin L, Cathepsin S, Cathepsin V/L2, Cathepsin X/Z/P, Cysteine proteinases, Cruzipain, Legumain, Otubain-2, KLKs, KLK4, KLK5, KLK6, KLK7, KLK8, KLK10, KLK11, KLK13, KLK14, Metallo proteinases, Meprin, Neprilysin, PSMA, BMP-1, MMPs, MMP1, MMP2, MMP3, MMP7, MMP8, MMP9, MMP10, MMP11, MMP12, MMP13, MMP14, MMP15, MMP16, MMP17, MMP19, MMP20, MMP23, MMP24, MMP26, MMP27, Serine proteases, activated protein C, Cathepsin A, Cathepsin G, Chymase, coagulation factor proteases, FVIIa, FIXa, FXa, FXIa, FXIIa, Elastase, Granzyme B, Guanidinobenzoatase, HtrAl, Human Neutrophil Elastase, Lactoferrin, Marapsin, NS3/4A, PACE4, Plasmin, PSA, tPA, Thrombin, Tryptase, uPA, Type II Transmembrane, Serine Proteases, TTSPs, DESCI, DPP-4, FAP, Hepsin, Matriptase-2, MT-SPl/Matriptase, TMPRSS2, TMPRSS3, or TMPRSS4.

[0030] In some embodiments, the hLY6G6D binding protein further comprises a second immunoglobulin variable region that specifically binds to a second target antigen.

[0031] In some embodiments, the hLY6G6D binding protein is an antibody-drug conjugate. In certain embodiments, the antibody is conjugated to a toxin, radioisotope, small molecule, diagnostic agent, therapeutic macromolecule, targeting moiety, or detectable moiety, via a conjugating moiety. In some embodiments, the conjugating moiety is cleavable by a protease. In some embodiments, the conjugating moiety is non-cleavable by a protease.

[0032] In another aspect, the present disclosure provides a pharmaceutical composition comprising a hLY6G6D binding protein of the invention and a pharmaceutically acceptable carrier.

[0033] In another aspect, the present disclosure provides a nucleic acid encoding hLY6G6D binding proteins comprising an immunoglobulin variable region that binds hLY6G6D, wherein the immunoglobulin variable region comprises heavy chain CDRs H1, H2, and H3 and light chain CDRs L1, L2, and L3 as recited for one of the Identifiers in Table 1.

[0034] The invention also provides isolated nucleic acids encoding anyone of the anti-hLY6G6D antibodies or antigen binding fragments of the invention.

[0035] The invention also provides expression vectors comprising one or more nucleic acids of the present invention. An expression vector is a DNA molecule comprising the regulatory elements necessary for transcription of a target nucleic acid in a host cell. Typically, the target nucleic acid is placed under the control of certain regulatory elements including constitutive or inducible promoters, tissue-specific regulatory elements, and enhancer elements. Such a target nucleic acid is said to be “operably linked to” the regulatory elements when the regulating element controls the expression of the gene.

[0036] These isolated nucleic acids and the expression vectors comprising them may be used to express the antibodies of the invention or antigen binding fragments thereof in recombinant host cells. Thus, the invention also provides host cells comprising an expression vector of the present invention.

[0037] The invention also provides a vessel or injection device comprising anyone of the anti-hLY6G6D antibodies or antigen binding fragments of the invention.

[0038] The invention also provides a method of producing an anti-hLY6G6D antibody or antigen binding fragment of the invention comprising: culturing a host cell comprising a polynucleotide encoding a heavy chain and/or light chain of an antibody of the invention (or an antigen binding fragment thereof) under conditions favorable to expression of the polynucleotide; and optionally, recovering the antibody or antigen binding fragment from the host cell and/or culture medium. In one embodiment, the polynucleotide encoding the heavy chain and the polynucleotide encoding the light chain are in a single vector. In another embodiment, the polynucleotide encoding the heavy chain and the polynucleotide encoding the light chain are in different vectors.

[0039] In another aspect, the present disclosure provides a method of treating a subject in need thereof comprising administering to the subject a therapeutically effective amount of a hLY6G6D binding protein described herein or the pharmaceutical composition described herein. In some embodiments, the subject in need thereof has been identified or diagnosed as having a cancer.

[0040] In another aspect, the present disclosure provides a method of producing a target binding protein of the invention, comprising: culturing the target cell described herein in a culture medium under a condition sufficient to produce the target binding protein; and recovering the target binding protein from the cell or the culture medium. In some embodiments, the method further comprises isolating the target binding protein recovered from the cell or the culture medium. In some embodiments, the method further comprises formulating the target binding protein into a pharmaceutical composition.

[0041] An understanding of the features and advantages of the present invention will be obtained by reference to the following detailed description that sets forth illustrative embodiments, in which the principles of the invention may be utilized, and the accompanying drawings.

### BRIEF DESCRIPTION OF THE FIGURES

[0042] FIG. 1A: guide tree mapping of sequence-binding relationships for LY6G6D binding antibodies of the invention.

[0043] FIG. 1B: Martin tree alignment of heavy chain CDR3 sequences for binding to a target membrane-proximal epitope on LY6G6D and the corresponding binding characteristics using cells displaying LY6G6D surface-exposed epitopes.

[0044] FIG. 2A multipoint BLI kinetic analysis of LY6G6D binding by LY6G6D binding antibodies of the invention.

[0045] FIG. 2B multipoint BLI kinetic analysis of LY6G6D binding by LY6G6D binding antibodies of the invention.

[0046] FIG. 3: parental antibodies CB21-498, CB21-499, CB21-512, CB21-476, and CB21-501 evaluated for polyreactivity using a BVP ELISA. Results for reference antibody enokizumab, gantenerumab, and LY6G6D binder 20A12.QNTv12 are shown for comparison.

[0047] FIG. 4: accelerated thermal stability SEC results comparing day zero to day 14 at 40° C. for three selected LY6G6D binding antibodies of the invention in an IgG format

[0048] FIG. 5: q ribbon representation of a model anti-LY6G6D immunoglobulin binding domain showing various substitutions examined during engineering of CB21-498. LFR3 and HFR2 indicate light chain framework region 3 and heavy chain framework region 2, respectively.

[0049] FIG. 6: A ribbon representation of a model anti-LY6G6D immunoglobulin binding domain showing various substitutions examined during engineering of CB21-498.

[0050] FIG. 7: depicts target binding affinity of an LY6G6D binding antibody of the invention comprising a T69Q substitution in HFR3.

[0051] FIG. 8: compares target binding affinity of LY6G6D binding antibody CB21-499 to an equivalent antibody CB21-499-177 comprising a D59E substitution in CDRH2.

[0052] FIG. 9: an isoaffinity plot for various LY6G6D binding antibody CB21-498 and CB21-499 family antibodies characterized by BLI.

[0053] FIG. 10: human/cyno crossreactivity for various LY6G6D binding antibody CB21-498 and CB21-499 family antibodies characterized by BLI.

[0054] FIG. 11: an AC-SINS analysis for LY6G6D binding antibody CB21-498-142 and CB21-499-177 as compared to various antibodies providing developability standards.

[0055] FIG. 12: a BVP-ELISA analysis for LY6G6D binding antibody CB21-498-142 and CB21-499-177 as compared to various antibodies providing developability standards.

[0056] FIG. 13: AbMap epitope mapping of CB21-499-177 and CB21-498-142 IgG vs. LY6G6D binding antibody 20A12.QNTv12.

### DETAILED DESCRIPTION OF THE INVENTION

[0057] Provided herein are target binding proteins that specifically bind to human lymphocyte antigen 6 family member G6D (hLY6G6D). In one aspect, the target binding protein may include a heavy chain variable domain and a light chain variable domain, which form an immunoglobulin variable region that specifically binds to HLY6G6D. In some embodiments, the hLY6G6D binding proteins of the invention may be single chain proteins, such as single chain antibodies. For example, the hLY6G6D binding proteins may be single chain fragment variable (scFv) antibodies. In some embodiments, the target binding proteins may be multichain proteins (e.g., intact IgG antibodies), at least one arm of which binds LY6G6D.

[0058] In some embodiments, the target binding proteins may be multispecific (e.g., bispecific) binding proteins that bind to one or more additional targets other than hLY6G6D. For example, the multispecific proteins may specifically bind to hLY6G6D and one or more other targets. By way of example, the other target may be a T cell protein such as CD3. In another example, the other target may be an immune checkpoint molecule such as PD-L1.

[0059] Also provided herein are related compositions, kits, nucleic acids, vectors, and recombinant cells, as well as related methods, including methods of using and methods of producing any of the target binding proteins described herein.

### Definitions

[0060] The term “a” and “an” refers to one or more (i.e., at least one) of the grammatical object of the article. By way of example, “a cell” encompasses one or more cells.

[0061] As used herein, the terms “about” and “approximately,” when used to modify an amount specified in a numeric value or range, indicate that the numeric value includes ±10%, and preferably ±5% or ±1% of the stated value.

[0062] In understanding the scope of the present disclosure, the terms “including” or “comprising” and their derivatives, as used herein, are intended to be open ended terms that specify the presence of the stated features, elements, components, groups, integers, and/or steps, but do not exclude the presence of other unstated features, elements, components, groups, integers and/or steps. The foregoing also applies to words having similar meanings such as the terms “including”, “having” and their derivatives. The term “consisting” and its derivatives, as used herein, are intended to be closed terms that specify the presence of the stated features, elements, components, groups, integers, and/or steps, but exclude the presence of other unstated features, elements, components, groups, integers and/or steps. The term “consisting essentially of,” as used herein, is intended to specify the presence of the stated features, elements, components, groups, integers, and/or steps as well as those that do not materially affect the basic and novel characteristic(s) of features, elements, components, groups, integers, and/or steps. It is understood that reference to any one of these transition terms (i.e. “comprising,” “consisting,” or “consisting essentially”) provides direct support for replacement to any of the other transition term not specifically used. For example, amending a term from “comprising” to “consisting essentially of” or “consisting of” would find direct support due to this definition for any elements disclosed throughout this disclosure. Based on this definition, any element disclosed herein or incorporated by reference may be included in or excluded from the claimed invention.

[0063] As used herein, a plurality of compounds, elements, or steps may be presented in a common list for convenience. However, these lists should be construed as though each member of the list is individually identified as a separate and unique member. Thus, no individual member of such list should be construed as a de facto equivalent of any other member of the same list solely based on their presentation in a common group without indications to the contrary.

[0064] The term “exemplary” is used herein to mean serving as an example, instance, or illustration. Any aspect or design described herein as “exemplary” is not necessarily to be construed as preferred or advantageous over other aspects or designs. Rather, use of the word exemplary is intended to present concepts in a more concrete fashion.

[0065] Certain molecules, constructs, compositions, elements, moieties, excipients, disorders, conditions, properties, steps, or the like may be discussed in the context of one specific embodiment or aspect or in a separate paragraph or section of this disclosure. It is understood that this is merely for convenience and brevity, and any such disclosure is equally applicable to and intended to be combined with any other embodiments or aspects found anywhere in the present disclosure and claims, which all form the application and claimed invention at the filing date. For example, a list of constructs, molecules, method steps, kits, or compositions described with respect to a construct, composition, or method is intended to and does find direct support for embodiments related to constructs, compositions, formulations, and methods described in any other part of this disclosure, even if those method steps, active agents, kits, or compositions are not re-listed in the context or section of that embodiment or aspect.

hLY6G6D Binding Proteins of the Invention

[0066] As used herein, a “target binding protein” of the invention comprises a heavy chain variable domain and a light chain variable domain, which together form at least one immunoglobulin variable region that specifically binds to human hLY6G6D. In each case, a target binding protein of the invention that comprises two or more binding domains may comprise only hLY6G6D binding domains, or may comprise at least one hLY6G6D binding domain and a binding domain that specifically binds to another target (e.g., CD3 or an immune checkpoint molecule such as PD-L1). Thus, references to a target binding protein or an anti-hLY6G6D antibody herein refer to both a monospecific (only hLY6G6D binding) or a multispecific (e.g., bispecific) target binding protein or anti-hLY6G6D antibody.

[0067] In some embodiments, the heavy chain variable domain and the light chain variable domain are disposed within the same polypeptide. In certain embodiments, the heavy chain variable domain and the light chain variable domain are coupled together by one or more linkers. The linker may be a peptide linker described in the Linkers section below. In some examples, the immunoglobulin variable region in the single chain polypeptide may be an scFv. Alternatively, the heavy chain variable domain and the light chain variable domain are disposed within two different polypeptides.

[0068] In some embodiments, the target binding protein may be a protein complex that comprises multiple polypeptides (e.g., two, three, four, five, six, seven, eight, nine, ten, or more polypeptides). In some examples, some or all (e.g., two, three, four, five, six, seven, eight, nine, ten, or more polypeptides) of the multiple polypeptides may be identical. In some examples, each of the multiple polypeptides in the target binding complex is different from the other.

[0069] The immunoglobulin variable region may reside within any of a variety of different constructs, including an antibody or a fragment thereof, a VH domain, a VHH domain, a VNAR domain, and a single chain fragment variable (scFv), BiTE or a component thereof, a (scFv)2, a NANOBOD Y®, a nanobody-HSA, VHH-scAb, a VHH-Fab, a Dual scFab, a F(ab′)2, a diabody, a CROSSMAB®, a DAF (two-in-one), a DAE (four-in-one), a DUTAMAB®, a DT-IgG, a knobs-in-holes common light chain, a knobs-in-holes assembly, a charge pair, a Fab-arm exchange, a SEEDbody, a LUZ-Y, a FcAb, a kl-body, an orthogonal Fab, a DVD-IgG, a IgG (H)-scFv, a scFv-(H) IgG, IgG (L)-scFv, scFv-(L) IgG, IgG (L,H)-Fv, IgG (H)-V, V(H)-IgG, IgG (L)-V, V(L)-IgG, KIH IgG-scFab, 2scFv-IgG, IgG-2scFv, scFv4-Ig, ZYBODY™, DVLIgG, Diabody-CH3, a triple body, a miniantibody, a minibody, a TriBi minibody, scFv-CH3 KIH, Fab-scFv, a F(ab′)2-scFv2, a scFv-KIH, a Fab-scFv-Fc, a tetravalent HCAb, a scDiabody-Fc, a Diabody-Fc, a tandem scFv-Fc, a VHH-Fc, a tandem VHH-Fc, a L′HH-Fc KiH, a Fab-VHH-Fc, an Intrabody, a dock and lock, an ImmTAC® (immune-mobilizing monoclonal TCRs (T cell receptors) against cancer), an IgG-IgG conjugate, a Cov-X-Body, a scFv1-PEG-scFv2, an Adnectin, a DARPin®, a fibronectin, an IgG, an IgM, an IgA, an IgE, an IgD, a DEP conjugate, TMEAbody™, SAFEbody®, TRITAC®, a dual affinity retargeting (DART®) bispecific antibody, a simultaneous multiple interaction T-cell engagers (SMITE), or SHIELD antibody.

[0070] Whether a target binding protein specifically binds to a polypeptide sequence (e.g., human LY6G6D) can be determined using any assay known in the art. Examples of assays known in the art to determining binding affinity include surface plasmon resonance (e.g., BIACORE® (Cytiva Sweden AB) or a similar technique (e.g. KinExa® (Sapidyne Instruments Inc.) or OCTET® (Sartorius)).

[0071] In preferred embodiments, a target binding protein of the invention is an antibody. As used herein, the term “antibody” refers to any form of antibody that exhibits the desired biological activity. The term antibody includes antigen-binding portions, i.e., “antigen binding sites,” (e.g., fragments, subsequences, complementarity determining regions (CDRs)) that retain capacity to bind antigen, including (i) a Fab fragment, a monovalent fragment consisting of the V_{L}, V_{H}, C_{L} and C_{H}l domains; (ii) a F(ab′)2 fragment, a bivalent fragment comprising two Fab fragments linked by a disulfide bridge at the hinge region; (iii) a Fd fragment consisting of the V_{H} and C_{H}l domains; (iv) a Fv fragment consisting of the V_{L} and V_{H} domains of a single arm of an antibody, (v) a dAb fragment (Ward et al., (1989) Nature 341:544-546), which consists of a V_{H} domain; and (vi) an isolated complementarity determining region (CDR). Single chain antibodies are also included by reference in the term “antibody.” Preferred therapeutic antibodies are intact IgG antibodies. The term “intact IgG” as used herein is meant as a polypeptide belonging to the class of antibodies that are substantially encoded by a recognized immunoglobulin gamma gene. In humans this class comprises IgG1, IgG2, IgG3, and IgG4. In mice this class comprises IgG1, IgG2a, IgG2b, IgG3. The known Ig domains in the IgG class of antibodies are V_{H}, Cγ1, Cγ2, Cγ3, V_{L}, and C_{L}.

[0072] The present invention includes anti-hLY6G6D antigen-binding fragments and methods of use thereof.

[0073] As used herein, a “full length antibody” is, in the case of an IgG, a bivalent molecule comprising two heavy chains and two light chains. Each heavy chain comprises a V_{H} domain followed by a constant domain (C_{H1}), a hinge region, and two more constant (C_{H2} and C_{H3}) domains; while each light chain comprises one V_{L} domain and one constant (C_{L}) domain. A full length antibody in the case of an IgM is a decavalent or dodecavalent molecule comprising 5 or 6 linked immunoglobulins in which each immunoglobulin monomer has two antigen binding sites formed of a heavy and light chain.

[0074] As used herein, unless otherwise indicated, “antibody fragment” or “antigen-binding fragment” refers to antigen-binding fragments of antibodies, i.e. antibody fragments that retain the ability to bind specifically to the antigen bound by the full-length antibody, e.g. fragments that retain one or more CDR regions. Examples of antigen-binding fragments include, but are not limited to, Fab, Fab′, F(ab′)₂, and Fv fragments; diabodies; linear antibodies; single-chain antibody molecules, e.g., sc-Fv; nanobodies and multispecific antibodies formed from antibody fragments.

[0075] The present invention includes anti-hLY6G6D Fab fragments and methods of use thereof. A “Fab fragment” is comprised of one light chain and the C_{H}1 and variable regions of one heavy chain. The heavy chain of a Fab molecule cannot form a disulfide bond with another heavy chain molecule. A “Fab fragment” can be the product of papain cleavage of an antibody.

[0076] The present invention includes anti-hLY6G6D antibodies and antigen-binding fragments thereof which comprise an Fc region and methods of use thereof. An “Fc” region contains two heavy chain fragments comprising the C_{H}3 and C_{H}2 domains of an antibody. The two heavy chain fragments are held together by two or more disulfide bonds and by hydrophobic interactions of the C_{H}3 domains.

[0077] The present invention includes anti-hLY6G6D Fab′ fragments and methods of use thereof. A “Fab′ fragment” contains one light chain and a portion or fragment of one heavy chain that contains the V_{H} domain and the C_{H}1 domain and also the region between the C_{H}1 and C_{H}2 domains, such that an interchain disulfide bond can be formed between the two heavy chains of two Fab′ fragments to form a F(ab′)₂ molecule.

[0078] The present invention includes anti-hLY6G6D F(ab′)₂ fragments and methods of use thereof. A “F(ab′)₂ fragment” contains two light chains and two heavy chains containing a portion of the constant region between the C_{H1} and C_{H2} domains, such that an interchain disulfide bond is formed between the two heavy chains. A F(ab′)₂ fragment thus is composed of two Fab′ fragments that are held together by a disulfide bond between the two heavy chains. An “F(ab′)₂ fragment” can be the product of pepsin cleavage of an antibody.

[0079] The present invention includes anti-hLY6G6D Fv fragments and methods of use thereof. The “Fv region” comprises the variable regions from both the heavy and light chains, but lacks the constant regions.

[0080] The present invention includes anti-hLY6G6D scFv fragments and methods of use thereof. The term “single-chain Fv” or “scFv” antibody refers to antibody fragments comprising the V_{H} and V_{L} domains of an antibody, wherein these domains are present in a single polypeptide chain. Generally, the Fv polypeptide further comprises a polypeptide linker between the V_{H} and V_{L} domains which enables the scFv to form the desired structure for antigen-binding. For a review of scFv, see Pluckthun (1994) The Pharmacology of Monoclonal Antibodies, vol. 113, Rosenburg and Moore eds. Springer-Verlag, New York, pp. 269-315. See also, International Patent Application Publication No. WO 88/01649 and U.S. Pat. Nos. 4,946,778 and 5,260,203.

[0081] The present invention includes anti-hLY6G6D domain antibodies and methods of use thereof. A “domain antibody” is an immunologically functional immunoglobulin fragment containing only the variable region of a heavy chain or the variable region of a light chain. In some instances, two or more V_{H} regions are covalently joined with a peptide linker to create a bivalent domain antibody. The two V_{H} regions of a bivalent domain antibody may target the same or different antigens.

[0082] The present invention includes anti-hLY6G6D bivalent antibodies and methods of use thereof. A “bivalent antibody” comprises two antigen-binding sites. In some instances, the two binding sites have the same antigen specificities. However, bivalent antibodies may be bispecific (see below).

[0083] The present invention includes anti-hLY6G6D diabodies and methods of use thereof. As used herein, the term “diabodies” refers to small antibody fragments with two antigen-binding sites, which fragments comprise a heavy chain variable domain (V_{H}) connected to a light chain variable domain (V_{L}) in the same polypeptide chain (V_{H}-V_{L} or V_{L}-V_{H}). By using a linker that is too short to allow pairing between the two domains on the same chain, the domains are forced to pair with the complementary domains of another chain and create two antigen-binding sites. Diabodies are described more fully in, e.g., EP 404,097; WO 93/11161; and Holliger et al. (1993) Proc. Natl. Acad. Sci. USA 90:6444-6448. Duobodies are described in Labrijn et al., 2013, Proc. Natl. Acad. Sci. USA 110 (13): 5145-5150. For a review of engineered antibody variants generally see Holliger and Hudson (2005) Nat. Biotechnol. 23:1126-1136.

[0084] Typically, an antibody or antigen-binding fragment of the invention which is modified in some way retains at least 10% of its binding activity (when compared to the parental antibody) when that activity is expressed on a molar basis. Preferably, an antibody or antigen-binding fragment of the invention retains at least 20%, 50%, 70%, 80%, 90%, 95% or 100% or more of the hLY6G6D binding affinity as the parental antibody. It is also intended that an antibody or antigen-binding fragment of the invention can include conservative or non-conservative amino acid substitutions (referred to as “conservative variants” or “function conserved variants” of the antibody) that do not substantially alter its biologic activity.

[0085] The present invention includes isolated anti-hLY6G6D antibodies and antigen-binding fragments thereof and methods of use thereof. Herein, the term “isolated” is not intended to refer to a complete absence of such biological molecules or to an absence of water, buffers, or salts or to components of a pharmaceutical formulation that includes the antibodies or fragments. An “isolated” antibody, antigen-binding fragment, nucleic acid, etc., is one which has been identified and separated and/or recovered from one or more components of its natural environment. In preferred embodiments, the antibody, antigen-binding fragment, nucleic acid, etc., is purified to 75% by weight or more, more preferably to 90% by weight or more, still more preferably to 95% by weight or more, and still more preferably to 98% by weight or more. Thus, “isolated” biological molecules are at least partially free of other biological molecules from the cells or cell cultures in which they are produced. Such biological molecules include nucleic acids, proteins, lipids, carbohydrates, or other material such as cellular debris and growth medium. An isolated antibody or antigen-binding fragment may further be at least partially free of expression system components such as biological molecules from a host cell or of the growth medium thereof.

[0086] The present invention includes anti-hLY6G6D chimeric antibodies (e.g., human constant domain/mouse variable domain) and methods of use thereof. As used herein, a “chimeric antibody” is an antibody having the variable domain from a first antibody and the constant domain from a second antibody, where the first and second antibodies are from different species. (U.S. Pat. No. 4,816,567; and Morrison et al., (1984) Proc. Natl. Acad. Sci. USA 81:6851-6855). Typically, the variable domains are obtained from an antibody from an experimental animal (the “parental antibody”), such as a rodent, and the constant domain sequences are obtained from human antibodies, so that the resulting chimeric antibody will be less likely to elicit an adverse immune response in a human subject than the parental (e.g., mouse) antibody.

[0087] The present invention includes anti-hLY6G6D humanized antibodies and antigen-binding fragments thereof (e.g., rat or mouse antibodies that have been humanized) and methods of use thereof. As used herein, the term “humanized antibody” refers to forms of antibodies that contain sequences from both human and non-human (e.g., mouse or rat) antibodies. In general, the humanized antibody will comprise substantially of at least one, and typically two, variable domains, in which all or substantially all of the hypervariable loops correspond to those of a non-human immunoglobulin, and all or substantially all of the framework (FR) regions are those of a human immunoglobulin sequence. The humanized antibody may optionally comprise at least a portion of a human immunoglobulin constant region (Fc). For more details about humanized antibodies, see, e.g., Jones et al., Nature, 321:522-525 (1986); Reichmann et al., Nature, 332:323-329 (1988); Presta, Curr. Op. Struct. Biol., 2:593-596 (1992); and Clark, Immunol. Today 21:397-402 (2000).

[0088] In general, the basic antibody structural unit comprises a tetramer. Each tetramer includes two identical pairs of polypeptide chains, each pair having one “light” (about 25 kDa) and one “heavy” chain (about 50-70 kDa). The amino-terminal portion of each chain includes a variable region of about 100 to 110 or more amino acids primarily responsible for antigen recognition. The carboxy-terminal portion of the heavy chain may define a constant region primarily responsible for effector function. Typically, human light chains are classified as kappa and lambda light chains. Furthermore, human heavy chains are typically classified as mu, delta, gamma, alpha, or epsilon, and define the antibody's isotype as IgM, IgD, IgG, IgA, and IgE, respectively. Within light and heavy chains, the variable and constant regions are joined by a “J” region of about 12 or more amino acids, with the heavy chain also including a “D” region of about 10 more amino acids. See generally, Fundamental Immunology Ch. 7 (Paul, W., ed., 2nd ed. Raven Press, N.Y. (1989).

[0089] The variable regions of each light/heavy chain pair form the antibody binding site. Thus, in general, an intact antibody has two binding sites. Except in bifunctional or bispecific antibodies, the two binding sites are, in general, the same.

[0090] Typically, the variable domains of both the heavy and light chains comprise three hypervariable regions, also called complementarity determining regions (CDRs), located within relatively conserved framework regions (FR). The CDRs are usually aligned by the framework regions, enabling binding to a specific epitope. In general, from N-terminal to C-terminal, both light and heavy chains variable domains comprise FR1, CDR1, FR2, CDR2, FR3, CDR3 and FR4. The assignment of amino acids to each domain is, generally, in accordance with the definitions of Sequences of Proteins of Immunological Interest, Kabat, et al.; National Institutes of Health, Bethesda, MD; 5^{th} ed.; NIH Publ. No. 91-3242 (1991); Kabat (1978) Adv. Prot. Chem. 32:1-75; Kabat, et al., (1977) J. Biol. Chem. 252:6609-6616; Chothia, et al., (1987) J Mol. Biol. 196:901-917 or Chothia, et al., (1989) Nature 342:878-883.

[0091] As used herein, the term “hypervariable region” refers to the amino acid residues of an antibody or antigen-binding fragment thereof that are responsible for antigen-binding. The hypervariable region comprises amino acid residues from a “complementarity determining region” or “CDR” (i.e. CDRL1, CDRL2 and CDRL3 in the light chain variable domain and CDRH1, CDRH2 and CDRH3 in the heavy chain variable domain). See Kabat et al. (1991) Sequences of Proteins of Immunological Interest, 5th Ed. Public Health Service, National Institutes of Health, Bethesda, Md. (defining the CDR regions of an antibody by sequence); see also Chothia and Lesk (1987) J. Mol. Biol. 196:901-917 (defining the CDR regions of an antibody by structure). As used herein, the term “framework” or “FR” residues refers to those variable domain residues other than the hypervariable region residues defined herein as CDR residues.

[0092] “Isolated nucleic acid molecule” or “isolated polynucleotide” means a DNA or RNA of genomic, mRNA, cDNA, or synthetic origin or some combination thereof which is not associated with all or a portion of a polynucleotide in which the isolated polynucleotide is found in nature, or is linked to a polynucleotide to which it is not linked in nature. For purposes of this disclosure, it should be understood that “a nucleic acid molecule comprising” a particular nucleotide sequence does not encompass intact chromosomes. Isolated nucleic acid molecules “comprising” specified nucleic acid sequences may include, in addition to the specified sequences, coding sequences for up to ten or even up to twenty or more other proteins or portions or fragments thereof, or may include operably linked regulatory sequences that control expression of the coding region of the recited nucleic acid sequences, and/or may include vector sequences.

[0093] The phrase “control sequences” refers to DNA sequences necessary for the expression of an operably linked coding sequence in a particular host organism. The control sequences that are suitable for prokaryotes, for example, include a promoter, optionally an operator sequence, and a ribosome binding site. Eukaryotic cells are known to use promoters, polyadenylation signals, and enhancers.

[0094] A nucleic acid or polynucleotide is “operably linked” when it is placed into a functional relationship with another nucleic acid sequence. For example, DNA for a presequence or secretory leader is operably linked to DNA for a polypeptide if it is expressed as a preprotein that participates in the secretion of the polypeptide; a promoter or enhancer is operably linked to a coding sequence if it affects the transcription of the sequence; or a ribosome binding site is operably linked to a coding sequence if it is positioned so as to facilitate translation. Generally, but not always, “operably linked” means that the DNA sequences being linked are contiguous, and, in the case of a secretory leader, contiguous and in reading phase. However, enhancers do not have to be contiguous. Linking is accomplished by ligation at convenient restriction sites. If such sites do not exist, the synthetic oligonucleotide adaptors or linkers are used in accordance with conventional practice.

[0095] As used herein, the expressions “cell,” “cell line,” and “cell culture” are used interchangeably and all such designations include progeny. Thus, the words “transformants” and “transformed cells” include the primary subject cell and cultures derived therefrom without regard for the number of transfers. It is also understood that not all progeny will have precisely identical DNA content, due to deliberate or inadvertent mutations. Mutant progeny that have the same function or biological activity as screened for in the originally transformed cell are included. Where distinct designations are intended, it will be clear from the context.

[0096] As used herein, “germline sequence” refers to a sequence of unrearranged immunoglobulin DNA sequences. Any suitable source of unrearranged immunoglobulin sequences may be used. Human germline sequences may be obtained, for example, from JOINSOLVER germline databases on the website for the National Institute of Arthritis and Musculoskeletal and Skin Diseases of the United States National Institutes of Health. Mouse germline sequences may be obtained, for example, as described in Giudicelli et al. (2005) Nucleic Acids Res. 33: D256-D261.

### Binding Affinity

[0097] By way of example, and not limitation, the antibodies and antigen-binding fragments disclosed herein may bind hLY6G6D bivalently with a KD value of 10×10−9 M or lower as determined by surface plasmon resonance (e.g., BIACORE®) or a similar technique (e.g. KinExa® or bio-layer interferometry (OCTET®)). In one embodiment, the antibodies and antigen-binding fragments disclosed herein may bind human CD3 bivalently with a K_{D} value of about 5-10×10⁻⁹ M as determined by surface plasmon resonance (e.g., BIACORE®) or a similar technique (e.g. KinExa® or OCTET®). Affinity is calculated as K_{D}=K_{off}/kₒₙ (k_{off} is the dissociation rate constant, Kₒₙ is the association rate constant and K_{D} is the equilibrium constant). Affinity can be determined at equilibrium by measuring the fraction bound (r) of labeled ligand at various concentrations (c). The data are graphed using the Scatchard equation: r/c=K(n−r): where r=moles of bound ligand/mole of receptor at equilibrium; c=free ligand concentration at equilibrium; K=equilibrium association constant; and n=number of ligand binding sites per receptor molecule. By graphical analysis, r/c is plotted on the Y-axis versus r on the X-axis, thus producing a Scatchard plot. Antibody affinity measurement by Scatchard analysis is well known in the art. See, e.g., van Erp et al., J. Immunoassay 12:425-43, 1991; Nelson and Griswold, Comput. Methods Programs Biomed. 27:65-8, 198.

Methods of Making Anti-hLY6G6D antibodies and Antigen-binding Fragments Thereof

[0098] The present invention includes methods for making an anti-hLY6G6D antibody or antigen-binding fragment thereof of the present invention.

[0099] The anti-hLY6G6D antibodies disclosed herein may be produced recombinantly (e.g., in an E. coli/T7 expression system, a mammalian cell expression system or a lower eukaryote expression system). In this embodiment, nucleic acids encoding the antibody immunoglobulin molecules of the invention (e.g., V_{H} or V_{L}) may be inserted into a pET-based plasmid and expressed in the E. coli/T7 system. For example, the present invention includes methods for expressing an antibody or antigen-binding fragment thereof or immunoglobulin chain thereof in a host cell (e.g., bacterial host cell such as E. coli such as BL21 or BL21DE3) comprising expressing T7 RNA polymerase in the cell which also includes a polynucleotide encoding an immunoglobulin chain that is operably linked to a T7 promoter. For example, in an embodiment of the invention, a bacterial host cell, such as a E. coli, includes a polynucleotide encoding the T7 RNA polymerase gene operably linked to a lac promoter and expression of the polymerase and the chain is induced by incubation of the host cell with IPTG (isopropyl-beta-D-thiogalactopyranoside).

[0100] There are several methods by which to produce recombinant antibodies which are known in the art. One example of a method for recombinant production of antibodies is disclosed in U.S. Pat. No. 4,816,567.

[0101] Transformation can be by any known method for introducing polynucleotides into a host cell. Methods for introduction of heterologous polynucleotides into mammalian cells are well known in the art and include dextran-mediated transfection, calcium phosphate precipitation, polybrene-mediated transfection, protoplast fusion, electroporation, encapsulation of the polynucleotide(s) in liposomes, biolistic injection and direct microinjection of the DNA into nuclei. In addition, nucleic acid molecules may be introduced into mammalian cells by viral vectors. Methods of transforming cells are well known in the art. See, for example, U.S. Pat. Nos. 4,399,216; 4,912,040; 4,740,461 and 4,959,455.

[0102] Thus, the present invention includes recombinant methods for making an anti-hLY6G6D antibody or antigen-binding fragment thereof of the present invention, or an immunoglobulin chain thereof, comprising introducing a polynucleotide encoding one or more immunoglobulin chains of the antibody or fragment (e.g., heavy and/or light immunoglobulin chain); culturing the host cell (e.g., CHO or Pichia or Pichia pastoris) under condition favorable to such expression and, optionally, isolating the antibody or fragment or chain from the host cell and/or medium in which the host cell is grown.

[0103] Anti-hLY6G6D antibodies can also be synthesized by any of the methods set forth in U.S. Pat. No. 6,331,415.

[0104] Eukaryotic and prokaryotic host cells, including mammalian cells as hosts for expression of the antibodies or fragments or immunoglobulin chains disclosed herein are well known in the art and include many immortalized cell lines available from the American Type Culture Collection (ATCC). These include, inter alia, Chinese hamster ovary (CHO) cells, NSO, SP2 cells, HeLa cells, baby hamster kidney (BHK) cells, monkey kidney cells (COS), human hepatocellular carcinoma cells (e.g., Hep G2), A549 cells, 3T3 cells, HEK-293 cells and a number of other cell lines. Mammalian host cells include human, mouse, rat, dog, monkey, pig, goat, bovine, horse and hamster cells. Cell lines of particular preference are selected through determining which cell lines have high expression levels. Other cell lines that may be used are insect cell lines, such as Sf9 cells, amphibian cells, bacterial cells, plant cells and fungal cells. Fungal cells include yeast and filamentous fungus cells including, for example, Pichia pastoris, Pichia finlandica, Pichia trehalophila, Pichia koclamae, Pichia membranaefaciens, Pichia minuta (Ogataea minuta, Pichia lindneri), Pichia opuntiae, Pichia thermotolerans, Pichia salictaria, Pichia guercuum, Pichia pijperi, Pichia stiptis, Pichia methanolica, Pichia sp., Saccharomyces cerevisiae, Saccharomyces sp., Hansenula polymorpha, Kluyveromyces sp., Kluyveromyces lactis, Candida albicans, Aspergillus nidulans, Aspergillus niger, Aspergillus oryzae, Trichoderma reesei, Chrysosporium lucknowense, Fusarium sp., Fusarium gramineum, Fusarium venenatum, Physcomitrella patens and Neurospora crassa. Pichia sp., any Saccharomyces sp., Hansenula polymorpha, any Kluyveromyces sp., Candida albicans, any Aspergillus sp., Trichoderma reesei, Chrysosporium lucknowense, any Fusarium sp., Yarrowia lipolytica, and Neurospora crassa. When recombinant expression vectors encoding the heavy chain or antigen-binding portion or fragment thereof, and/or the light chain or antigen-binding fragment thereof are introduced into mammalian host cells, the antibodies are produced by culturing the host cells for a period of time sufficient to allow for expression of the antibody or fragment or chain in the host cells or secretion into the culture medium in which the host cells are grown.

[0105] Antibodies and antigen-binding fragments thereof and immunoglobulin chains can be recovered from the culture medium using standard protein purification methods. Further, expression of antibodies and antigen-binding fragments thereof and immunoglobulin chains of the invention (or other moieties therefrom) from production cell lines can be enhanced using a number of known techniques. For example, the glutamine synthetase gene expression system (the GS system) is a common approach for enhancing expression under certain conditions. The GS system is discussed in whole or part in connection with European Patent Nos. 0216846, 0256055, and 0323997 and 0338841. Thus, in an embodiment of the invention, the mammalian host cells (e.g., CHO) lack a glutamine synthetase gene and are grown in the absence of glutamine in the medium wherein, however, the polynucleotide encoding the immunoglobulin chain comprises a glutamine synthetase gene which complements the lack of the gene in the host cell.

[0106] The present invention includes methods for purifying an anti-hLY6G6D antibody or antigen-binding fragment thereof of the present invention comprising introducing a sample comprising the antibody or fragment to a purification medium (e.g., cation exchange medium, anion exchange medium, hydrophobic exchange medium, affinity purification medium (e.g., protein-A, protein-G, protein-A/G, protein-L)) and either collecting purified antibody or fragment from the flow-through fraction of said sample that does not bind to the medium; or, discarding the flow-through fraction and eluting bound antibody or fragment from the medium and collecting the eluate. In an embodiment of the invention, the medium is in a column to which the sample is applied. In an embodiment of the invention, the purification method is conducted following recombinant expression of the antibody or fragment in a host cell, e.g., wherein the host cell is first lysed and, optionally, the lysate is purified of insoluble materials prior to purification on a medium.

[0107] In general, glycoproteins produced in a particular cell line or transgenic animal will have a glycosylation pattern that is characteristic for glycoproteins produced in the cell line or transgenic animal. Therefore, the particular glycosylation pattern of an antibody will depend on the particular cell line or transgenic animal used to produce the antibody. However, all antibodies encoded by the nucleic acid molecules provided herein, or comprising the amino acid sequences provided herein, comprise the instant invention, independent of the glycosylation pattern the antibodies may have. Similarly, in particular embodiments, antibodies with a glycosylation pattern comprising only non-fucosylated N-glycans may be advantageous, because these antibodies have been shown to typically exhibit more potent efficacy than their fucosylated counterparts both in vitro and in vivo (See for example, Shinkawa et al., J. Biol. Chem. 278:3466-3473 (2003); U.S. Pat. Nos. 6,946,292 and 7,214,775). These antibodies with non-fucosylated N-glycans are not likely to be immunogenic because their carbohydrate structures are a normal component of the population that exists in human serum IgG.

[0108] The present invention further includes anti-hLY6G6D antigen-binding fragments of the anti-hLY6G6D antibodies disclosed herein. The antibody fragments include F (ab) 2 fragments, which may be produced by enzymatic cleavage of an IgG by, for example, pepsin. Fab fragments may be produced by, for example, reduction of F(ab) 2 with dithiothreitol or mercaptoethylamine.

[0109] Immunoglobulins may be assigned to different classes depending on the amino acid sequences of the constant domain of their heavy chains. In some embodiments, different constant domains may be appended to humanized VL and VH regions derived from the CDRs provided herein. There are at least five major classes of immunoglobulins: IgA, IgD, IgE, IgG and IgM, and several of these may be further divided into subclasses (isotypes), e.g. IgG1, IgG2, IgG3 and IgG4; IgA1 and IgA2. The invention comprises antibodies and antigen-binding fragments of any of these classes or subclasses of antibodies.

[0110] In one embodiment, the antibody or antigen-binding fragment comprises a heavy chain constant region, e.g. a human constant region, such as γ1, γ2, 3, or γ4 human heavy chain constant region or a variant thereof. In another embodiment, the antibody or antigen-binding fragment comprises a light chain constant region, e.g. a human light chain constant region, such as lambda or kappa human light chain region or variant thereof. By way of example, and not limitation the human heavy chain constant region can be γ4 and the human light chain constant region can be kappa. In an alternative embodiment, the Fc region of the antibody is γ4 with a Ser228Pro mutation (Schuurman, J et. al., Mol. Immunol. 38:1-8, 2001).

[0111] In one embodiment, the antibody or antigen-binding fragment comprises a heavy chain constant region of the IgG1 subtype. In one embodiment, the antibody or antigen-binding fragment comprises a heavy chain constant region of the IgG2 subtype. In one embodiment, the antibody or antigen-binding fragment comprises a heavy chain constant region of the IgG4 subtype.

### Antibody Engineering

[0112] Further included are embodiments in which the anti-hLY6G6D antibodies and antigen-binding fragments thereof are engineered antibodies to include modifications to framework residues within the variable domains the antibody, e.g. to improve the properties of the antibody or fragment. Typically, such framework modifications are made to decrease the immunogenicity of the antibody or fragment. This is usually accomplished by replacing non-CDR residues in the variable domains (i.e. framework residues) in a parental (e.g. rodent) antibody or fragment with analogous residues from the immune repertoire of the species in which the antibody is to be used, e.g. human residues in the case of human therapeutics. Such an antibody or fragment is referred to as a “humanized” antibody or fragment. In some cases, it is desirable to increase the affinity, or alter the specificity of an engineered (e.g. humanized) antibody. One approach is to mutate one or more framework residues to the corresponding germline sequence. More specifically, an antibody or fragment that has undergone somatic mutation can contain framework residues that differ from the germline sequence from which the antibody is derived. Such residues can be identified by comparing the antibody or fragment framework sequences to the germline sequences from which the antibody or fragment is derived. Another approach is to revert to the original parental (e.g., rodent) residue at one or more positions of the engineered (e.g. humanized) antibody, e.g. to restore binding affinity that may have been lost in the process of replacing the framework residues. (See, e.g., U.S. Pat. Nos. 5,693,762, 5,585,089 and 5,530,101).

[0113] In certain embodiments, the anti-hLY6G6D antibodies and antigen-binding fragments thereof are engineered (e.g. humanized) to include modifications in the framework and/or CDRs to improve their properties. Such engineered changes can be based on molecular modelling. A molecular model for the variable region for the parental (non-human) antibody sequence can be constructed to understand the structural features of the antibody and used to identify potential regions on the antibody that can interact with the antigen. Conventional CDRs are based on alignment of immunoglobulin sequences and identifying variable regions. Kabat et al., (1991) Sequences of Proteins of Immunological Interest, Kabat, et al.; National Institutes of Health, Bethesda, MD; 5^{th} ed.; NIH Publ. No. 91-3242; Kabat (1978) Adv. Prot. Chem. 32:1-75; Kabat, et al., (1977) J. Biol. Chem. 252:6609-6616. Chothia and coworkers carefully examined conformations of the loops in crystal structures of antibodies and proposed hypervariable loops. Chothia, et al., (1987) J Mol. Biol. 196:901-917 or Chothia, et al., (1989) Nature 342:878-883. There are variations between regions classified as “CDRs” and “hypervariable loops”. Later studies (Raghunathan et al, (2012) J. Mol Recog. 25, 3, 103-113) analyzed several antibody-antigen crystal complexes and observed that the antigen binding regions in antibodies do not necessarily conform strictly to the “CDR” residues or “hypervariable” loops. The molecular model for the variable region of the non-human antibody can be used to guide the selection of regions that can potentially bind to the antigen. In practice the potential antigen binding regions based on the model differ from the conventional “CDR”s or “hypervariable” loops. Commercial scientific software such as Discovery Studio (BIOVIA, Dassault Systems)) can be used for molecular modeling. Human frameworks can be selected based on best matches with the non-human sequence both in the frameworks and in the CDRs. For FR4 (framework 4) in VH, VJ regions for the human germlines are compared with the corresponding non-human region. In the case of FR4 (framework 4) in VL, J-kappa and J-Lambda regions of human germline sequences are compared with the corresponding non-human region. Once suitable human frameworks are identified, the CDRs are grafted into the selected human frameworks. In some cases, certain residues in the VL-VH interface can be retained as in the non-human (parental) sequence. Molecular models can also be used for identifying residues that can potentially alter the CDR conformations and hence binding to antigen. In some cases, these residues are retained as in the non-human (parental) sequence. Molecular models can also be used to identify solvent exposed amino acids that can result in unwanted effects such as glycosylation, deamidation and oxidation. Developability filters can be introduced early on in the design stage to eliminate/minimize these potential problems.

[0114] Another type of framework modification involves mutating one or more residues within the framework region, or even within one or more CDR regions, to remove T cell epitopes to thereby reduce the potential immunogenicity of the antibody. This approach is also referred to as “deimmunization” and is described in further detail in U.S. Pat. No. 7,125,689.

[0115] In particular embodiments, it will be desirable to change certain amino acids containing exposed side-chains to another amino acid residue in order to provide for greater chemical stability of the final antibody, so as to avoid deamidation or isomerization. The deamidation of asparagine may occur on NG, DG, NG, NS, NA, NT, QG or QS sequences and result in the creation of an isoaspartic acid residue that introduces a kink into the polypeptide chain and decreases its stability (isoaspartic acid effect). Isomerization can occur at DG, DS, DA or DT sequences. In certain embodiments, the antibodies of the present disclosure do not contain deamidation or asparagine isomerism sites.

[0116] For example, an asparagine (Asn) residue may be changed to Gln or Ala to reduce the potential for formation of isoaspartate at any Asn-Gly sequences, particularly within a CDR. A similar problem may occur at a Asp-Gly sequence. Reissner and Aswad (2003) Cell. Mol. Life Sci. 60:1281. Isoaspartate formation may debilitate or completely abrogate binding of an antibody to its target antigen. See, Presta (2005) J. Allergy Clin. Immunol. 116:731 at 734. In one embodiment, the asparagine is changed to glutamine (Gln). It may also be desirable to alter an amino acid adjacent to an asparagine (Asn) or glutamine (Gln) residue to reduce the likelihood of deamidation, which occurs at greater rates when small amino acids occur adjacent to asparagine or glutamine. See, Bischoff & Kolbe (1994) J. Chromatog. 662:261. In addition, any methionine residues (typically solvent exposed Met) in CDRs may be changed to Lys, Leu, Ala, or Phe or other amino acids in order to reduce the possibility that the methionine sulfur would oxidize, which could reduce antigen-binding affinity and also contribute to molecular heterogeneity in the final antibody preparation. Id. Additionally, in order to prevent or minimize potential scissile Asn-Pro peptide bonds, it may be desirable to alter any Asn-Pro combinations found in a CDR to Gln-Pro, Ala-Pro, or Asn-Ala. Antibodies with such substitutions are subsequently screened to ensure that the substitutions do not decrease the affinity or specificity of the antibody for hLY6G6D, or other desired biological activity to unacceptable levels.

TABLE 3
Exemplary stabilizing CDR variants

| CDR Residue | Stabilizing Variant Sequence |
|---|---|
| Asn-Gly | Gln-Gly, Ala-Gly, or Asn-Ala |
| (N-G) | (Q-G), (A-G), or (N-A) |
| Asp-Gly | Glu-Gly, Ala-Gly or Asp-Ala |
| (D-G) | (E-G), (A-G), or (D-A) |
| Met | Lys, Leu, Ala, or Phe |
| (M) | (K), (L), (A), or (F) |
| Asn | Gln or Ala |
| (N) | (Q) or (A) |
| Asn-Pro | Gln-Pro, Ala-Pro, or Asn-Ala |
| (N-P) | (Q-P), (A-P), or (N-A) |
| Asn-Ser | Asn-Gly (N-G), Gly-Gly (G-G), |
| (N-S) | Ala-Ser (A-S), Asp-Ser (D-S) |

[0117] Another type of framework modification involves mutating one or more residues within the framework regions to prevent aggregation. The risk of an antibody to aggregate can be assessed using the spatial aggregation propensity. See, Chennamsetty, et al. (2010) J. Phys. Chem. 114, 6614-6624. The method requires the calculation of the Solvent Accessible Area (SAA) for each atom. The molecular aggregation score is then calculated as the sum of all atomic scores. For a given radius and size of molecule, this is an approximate indication of its overall tendency to aggregate. Residues with a high aggregation score are replaced by residues with a lower score (e.g. more hydrophilic amino acids).

### Antibody Engineering of the Fc Region

[0118] The antibodies (e.g., humanized antibodies) and antigen-binding fragments thereof disclosed herein can also be engineered to include modifications within the Fc region, typically to alter one or more properties of the antibody, such as serum half-life, complement fixation, Fc receptor binding, and/or effector function (e.g., antigen-dependent cellular cytotoxicity). Furthermore, the antibodies and antigen-binding fragments thereof disclosed herein can be chemically modified (e.g., one or more chemical moieties can be attached to the antibody) or be modified to alter its glycosylation, again to alter one or more properties of the antibody or fragment. Each of these embodiments is described in further detail below. The numbering of residues in the Fc region is that of the EU index of Kabat.

[0119] The antibodies and antigen-binding fragments thereof disclosed herein also include antibodies and fragments with modified (or blocked) Fc regions to provide altered effector functions. See, e.g., U.S. Pat. No. 5,624,821; WO2003/086310; WO2005/120571; WO2006/0057702. Such modifications can be used to enhance or suppress various reactions of the immune system, with possible beneficial effects in diagnosis and therapy. Alterations of the Fc region include amino acid changes (substitutions, deletions and insertions), glycosylation or deglycosylation, and adding multiple Fc regions. Changes to the Fc can also alter the half-life of antibodies in therapeutic antibodies, enabling less frequent dosing and thus increased convenience and decreased use of material. See Presta (2005) J. Allergy Clin. Immunol. 116:731 at 734-35.

[0120] In one embodiment, the antibody or antigen-binding fragment of the invention is an IgG4 isotype antibody or fragment comprising a Serine to Proline mutation at a position corresponding to position 228 (S228P; EU index) in the hinge region of the heavy chain constant region. This mutation has been reported to abolish the heterogeneity of inter-heavy chain disulfide bridges in the hinge region (Angal et al (1993). Mol. Immunol. 30:105-108; position 241 is based on the Kabat numbering system).

[0121] In one embodiment of the invention, the hinge region of CH1 is modified such that the number of cysteine residues in the hinge region is increased or decreased. This approach is described further in U.S. Pat. No. 5,677,425. The number of cysteine residues in the hinge region of CH1 is altered, for example, to facilitate assembly of the light and heavy chains or to increase or decrease the stability of the antibody.

[0122] In another embodiment, the Fc hinge region of an antibody or antigen-binding fragment of the invention is mutated to decrease the biological half-life of the antibody or fragment. More specifically, one or more amino acid mutations are introduced into the CH2-CH3 domain interface region of the Fc-hinge fragment such that the antibody or fragment has impaired Staphylococcyl protein A (SpA) binding relative to native Fc-hinge domain SpA binding. This approach is described in further detail in U.S. Pat. No. 6,165,745.

[0123] In another embodiment, the antibody or antigen-binding fragment of the invention is modified to increase its biological half-life. Various approaches are possible. For example, one or more of the following mutations can be introduced: T252L, T254S, T256F, as described in U.S. Pat. No. 6,277,375. Alternatively, to increase the biological half-life, the antibody can be altered within the CH1 or CL region to contain a salvage receptor binding epitope taken from two loops of a CH2 domain of an Fc region of an IgG, as described in U.S. Pat. Nos. 5,869,046 and 6,121,022.

[0124] In yet other embodiments, the Fc region is altered by replacing at least one amino acid residue with a different amino acid residue to alter the effector function(s) of the antibody or antigen-binding fragment. For example, one or more amino acids selected from amino acid residues 234, 235, 236, 237, 297, 318, 320 and 322 can be replaced with a different amino acid residue such that the antibody has an altered affinity for an effector ligand and retains the antigen-binding ability of the parent antibody. The effector ligand to which affinity is altered can be, for example, an Fc receptor or the C1 component of complement. This approach is described in further detail in U.S. Pat. Nos. 5,624,821 and 5,648,260.

[0125] In another example, one or more amino acids selected from amino acid residues 329, 331 and 322 can be replaced with a different amino acid residue such that the antibody has altered C1q binding and/or reduced or abolished complement dependent cytotoxicity (CDC). This approach is described in further detail in U.S. Pat. No. 6,194,551.

[0126] In another example, one or more amino acid residues within amino acid positions 231 and 239 are altered to thereby alter the ability of the antibody to fix complement. This approach is described further in PCT Publication WO 94/29351.

[0127] The proteins of the invention, which are preferably antibodies and most preferably IgG antibodies or fragments thereof, may have altered (e.g., relative to an unmodified antibody) FcγR binding properties (examples of binding properties include but are not limited to, binding specificity, equilibrium dissociation constant (K_{D}), dissociation and association rates (k_{off} and kₒₙ respectively), binding affinity and/or avidity) and that certain alterations are more or less desirable. It is known in the art that the equilibrium dissociation constant (K_{D}) is defined as k_{off}/kₒₙ, and Kₐ is the reciprocal of K_{D}.

[0128] The affinities and binding properties of an Fc region for its ligand, may be determined by a variety of in vitro assay methods (biochemical or immunological based assays) known in the art for determining Fc-FcγR interactions, i.e., specific binding of an Fc region to an FcγR including but not limited to, equilibrium methods (e.g., enzyme-linked immuno absorbent assay (ELISA) or radioimmunoassay (RIA)), or kinetics (e.g. BIACORE®, Octet®, or KinExa® analysis), and other methods such as indirect binding assays, competitive inhibition assays, fluorescence resonance energy transfer (FRET), gel electrophoresis and chromatography (e.g., gel filtration). These and other methods may utilize a label on one or more of the components being examined and/or employ a variety of detection methods including but not limited to chromogenic, fluorescent, luminescent, or isotopic labels.

[0129] In certain embodiments, the proteins of the present invention bind to one or more human FcγRs selected from the group consisting of FcγRI, FcγRIIB, FcγRIIC, FcγRIIIA-F158, and FcγRIIIA-V158 with an affinity at least 10-fold, preferably at least 30-fold, and more preferably at least 100-fold, less than equivalent protein having a wild-type human IgG1 heavy chain constant domain Fc region or a wild-type human IgG4 heavy chain constant domain Fc region.

[0130] In various embodiments, the proteins of the invention comprise an immunoglobulin Fc region comprising an immunoglobulin C2 region and an immunoglobulin C3 region and an immunoglobulin hinge region. By way of example, the immunoglobulin Fc region may be an IgG Fc region, an IgE Fc region, or an IgA Fc region. In certain preferred embodiments, the protein comprises two immunoglobulin Fc regions, each immunoglobulin Fc region comprising an immunoglobulin C2 region and an immunoglobulin C3 region and an immunoglobulin hinge region, wherein the hinge region of one of the immunoglobulin Fc regions is bound to the hinge region of the other immunoglobulin Fc region to form a dimeric Fc structure. Most preferably, such a protein is a human or humanized IgG protein.

[0131] In certain embodiments, the proteins of the invention comprise a mutated IgG4 Fc region, and preferably the protein is an IgG comprising two mutated IgG4 Fc regions to form a dimeric Fc structure. By way of example, a mutated IgG4 Fc region may comprise one of the mutations, or mutational combinations, recited in Table 3. The numbering system of the constant region referred to in this table is that of the EU index as set forth in Kabat et al. (1991, NIH Publication 91-3242, National Technical Information Service, Springfield, VA). In the table, the first letter and number represent the unmodified amino acid and its position and the second letter represents the substituted amino acid at said position. For those entries that include combinations of more than one mutation, each mutation in the combination is separated by a “/”. Deletions are indicated by “Δ.

TABLE 4

| | | |
|---|---|---|
| N297Q | L235E | N297Q/L235E |
| F234A | Q268A | F234A/L235A/G237A/ |
| | | P238A |
| F234A/L235A/ΔG236/ | F234A/L235A/G237A/ | F234A/L235A/ΔG236/ |
| G237A/P238A | P238A/Q268A | G237A/P238A/Q268A |
| F234A/L235A | L235E/P329G | L235A/G237A/E318A |
| F234A/L235A/G237A/ | F234A/L235A/ΔG236/ | F234A/L235A/G237A/ |
| P238S | G237A/P238S | P238S/Q268A |
| F234A/L235A/ΔG236/ | | |
| G237A/P238S/Q268A | | |

[0132] In certain embodiments, the proteins of the invention comprise a mutated IgG1 Fc region, and preferably the protein is an IgG comprising two mutated IgG1 Fc regions to form a dimeric Fc structure. By way of example, a mutated IgG1 Fc region may comprise one of the mutations recited in Table 4. The numbering system of the constant region referred to in this table is that of the EU index as set forth in Kabat et al. (1991, NIH Publication 91-3242, National Technical Information Service, Springfield, VA). In the table, the first letter and number represent the unmodified amino acid and its position and the second letter represents the substituted amino acid at said position.

TABLE 5

| | | |
|---|---|---|
| K222Y | P232K | A231K |
| E233N | E233Q | E233R |
| E233S | E233T | E233H |
| E233A | E233V | E233L |
| E233F | E233M | E233Y |
| E233W | E233G | L234D |
| L234E | L234N | L234Q |
| L234T | L234H | L234F |
| L234K | L234R | L234S |
| L234A | L234M | L234V |
| L235E | L235T | L235F |
| L235K | L235R | L235A |
| L235M | L235W | L235N |
| L235Q | L235H | L235V |
| G236A | G236N | G236R |
| G236H | G236L | G236F |
| G236P | G237A | G237E |
| G237N | G237Q | G237K |
| G237R | G237S | G237T |
| G237H | G237L | G237I |
| G237F | G237M | G237Y |
| G237P | P238K | P238N |
| P238R | P238S | P238T |
| P238Y | P238G | P238A |
| S239A | S239N | S239F |
| S239K | S239R | S239V |
| S239W | S239P | S239H |
| S239Y | D249H | V240A |
| F241W | F241L | F243W |
| F243L | F243E | P244H |
| P245A | P247V | P247G |
| V253I | V263I | V263T |
| V263M | V264D | V264E |
| V264K | V264F | V264M |
| V264H | V264W | V264G |
| V264Q | V264A | V264L |
| D265A | D265E | D265Q |
| D265S | D265H | D265V |
| D265L | D265F | D265M |
| D265Y | D265N | D265G |
| V266T | V266M | V266A |
| S267G | S267H | S267N |
| S267P | S267R | S267T |
| S267F | S267W | E269A |
| E269K | E269S | E269V |
| E269F | E269I | E269M |
| E269W | E269H | E269T |
| E269L | E269N | E269Y |
| E269R | E269P | E269G |
| D270A | D270N | D270E |
| D270Q | D270T | D270H |
| D270R | D270S | D270L |
| D270I | D270F | D270W |
| D270P | D270G | P271H |
| P271Q | P271K | P271R |
| P271S | P271V | P271F |
| P271W | D280L | D280W |
| D280P | E293F | E294A |
| E293Y | E294K | E294R |
| E294S | E294V | E294L |
| E294F | Q295A | Q295W |
| Q295P | Q295G | Y296E |
| Y296Q | Y296D | Y296N |
| Y296S | Y296T | Y296L |
| Y296I | Y296A | Y296V |
| Y296M | N297S | N297D |
| N297Q | N297A | S298T |
| S298N | S298K | S298R |
| T299A | T299H | T299D |
| T299E | T299N | T299Q |
| T299K | T299R | T299I |
| T299F | T299M | T299Y |
| T299W | T299S | T299V |
| T299P | T299G | Y300E |
| Y300K | Y300R | Y300S |
| Y300P | Y300W | V303A |
| V303D | W313F | E318A |
| E318V | E318Q | E318H |
| E318L | E318Y | K320A |
| K322A | K322E | N325A |
| N325V | N325H | N325K |
| N325Y | N325W | N325P |
| N325G | N325Q | N325D |
| N325E | N325L | N325I |
| A327Q | A327E | A327N |
| A327L | A327I | A327F |
| A327W | L328N | L328F |
| L328H | L328R | L328T |
| L328V | L328I | L328P |
| L328M | L328E | L328A |
| P329A | P329F | P329D |
| P329N | P329Q | P329K |
| P329S | P329T | P329H |
| P329V | P329L | P329M |
| P329Y | P329W | P329G |
| P329R | A330L | A330R |
| A330P | A330T | A330V |
| A330F | A330H | P331A |
| P331S | P331N | P331E |
| I332K | I332N | I332Q |
| I332T | I332H | I332Y |
| I332A | I332R | E333N |
| E333R | I336E | I336Y |
| S337H | | |

[0133] In certain embodiments, a mutated IgG1 Fc region may comprise one of the mutational combinations recited in Table 5. The numbering system of the constant region referred to in this table is that of the EU index as set forth in Kabat et al. (1991, NIH Publication 91-3242, National Technical Information Service, Springfield, VA). In the table, the first letter and number represent the unmodified amino acid and its position and the second letter represents the substituted amino acid at said position. For each of the combinations of more than one mutation, each mutation in the combination is separated by a “/” and deletions are indicated by a “Δ”.

TABLE 6

| | | |
|---|---|---|
| C220S/C226S/C229S/P238S | C226S/C229S/E233P/L234V/ | E233P/L234V/L235A |
| | L235A | |
| E233P/L234V/L235A/ΔG236 | E233P/L234V/L235A/ΔG236/ | L234A/L235A |
| | A327G/A330S/P331S | |
| L235A/G237A | L235A/G237A/E318S/K320S/ | L235A/G237A/P331A |
| | K322S | |
| L234F/L235E | L234F/L235E/D265A | L234F/L235E/D265A/N297Q/ |
| | | P331S |
| L234F/L235E/N297Q | L234F/L235E/P329G | L234F/L235A/K322Q/M252Y/ |
| | | S254T/T256E |
| L234F/L235Q/K322Q/M252Y/ | L234F/L235Q/P331G/M252Y/ | G236R/L328R |
| S254T/T256E | S254T/T256E | |
| S239D/D265I/N297D/1332E | S239D/D265L/N297D/I332E | S239D/D265F/N297D/I332E |
| S239D/D265Y/N297D/1332E | S239D/D265T/N297D/I332E | S239D/N297D/A330Y/I332E |
| S239D/F241S/F243H/V262T/ | V264E/N297D/I332E | D265A/P331S |
| V264T/N297D/K326E/I332E | | |
| D265A/N297Q | N297D/D265Y/T299L/I332E | N297D/D265Y/1332E |
| N297D/I332E/Y296D | N297D/I332E | N297D/I332E/Y296E |
| N297D/I332E/Y296N | N297D/I332E/Y296Q | N297D/I332E/Y296H |
| N297D/I332E/Y296T | N297D/I332E/T299V | N297D/I332E/T299I |
| N297D/I332E/T299L | N297D/I332E/T299F | N297D/I332E/T299H |
| N297D/I332E/T299E | N297D/I332E/A330Y | N297D/I332E/S298A/A330Y |
| N297E/D265F/I332E | N297E/I332E | F241E/F243R/V262E/V264R |
| F241E/F243Q/V262T/V264E | F241L/F243L/V262I/V264I | F241W/F243W |
| F241W/F243W/V262A/V264A | F241L/V262I | F243L/V262I/V264W |
| F241Y/F243Y/V262T/V264T | F241E/F243R/V262E/V264R | F241E/F243Q/V262T/V264E |
| F241R/F243Q/V262T/V264R | F241E/F243Y/V262T/V264R | P244H/P245A/P247V |
| F241E/F243R/V262E/V264R/ | F241E/F243Y/V262T/V264R | F241E/F243Y/V262T/V264R/ |
| I332E | | I332E |
| S239E/D265G | S239E/D265N | S239E/D265Q |
| M252Y/S254T/T256E | S267Q/A327S | S267L/A327S |
| N297S/I332E | S239N/I332N | S239N/I332Q |
| S239Q/I332N | S239Q/I332Q | S298N/Y300S |
| S298N/T299A/Y300S | N297Q/S298N/Y300S | E318S/K320S/K322S |
| E318S/K320S/K322S/P311A | L328E/I332E | L328N/I332E |
| L234A/L235A/G237A/P238A/ | L234A/L235A/G237A/P238S/ | L234A/L235A/G237A/P238A/ |
| H268A/A330S/P331S | H268A/A330S/P331S | H268A/A330S/P331S |
| L328Q/I332E | L328H/1332E | |

[0134] In certain embodiments, the proteins of the invention comprise a wild type or mutated IgG2 Fc region, and preferably the protein is an IgG comprising two wild type or mutated IgG2 Fc regions to form a dimeric Fc structure. A mutated IgG2 Fc region may comprise one of the mutations, or mutational combinations, recited in Table 6. The numbering system of the constant region referred to in this table is that of the EU index as set forth in Kabat et al. (1991, NIH Publication 91-3242, National Technical Information Service, Springfield, VA). In the table, the first letter and number represent the unmodified amino acid and its position and the second letter represents the substituted amino acid at said position. For those entries that include combinations of more than one mutation, each mutation in the combination is separated by a “/”.

TABLE 7

| | | |
|---|---|---|
| V234A | G237A | A235E/G237A |
| V234A/A235E/G237A | V234A/G237A | V234A/G237A/P238S |
| H268Q/V309L/A330S/P331S | V234A/G237A/H268A/V309L/ | V234A/G237A/H268Q/V309L/ |
| | A330S/P331S | A330S/P331S |
| V234A/G237A/P238S/H268A/ | P233S/V234A/G237A/P238S | P233S/V234A/G237A/H268A/ |
| V309L/A330S/P331S | | V309L/A330S/P331S |
| P233S/V234A/G237A/H268Q/ | P233S/V234A/G237A/P238S/ | |
| V309L/A330S/P331S | H268A/V309L/A330S/P331S | |

Production of Antibodies with Modified Glycosylation

[0135] In still another embodiment, the antibodies or antigen-binding fragments of the invention comprise a particular glycosylation pattern. For example, an afucosylated or an aglycosylated antibody or fragment can be made (i.e., the antibody lacks fucose or glycosylation, respectively). The glycosylation pattern of an antibody or fragment may be altered to, for example, increase the affinity or avidity of the antibody or fragment for a hLY6G6D antigen. Such modifications can be accomplished by, for example, altering one or more of the glycosylation sites within the antibody or fragment sequence. For example, one or more amino acid substitutions can be made that result in removal of one or more of the variable region framework glycosylation sites to thereby eliminate glycosylation at that site. Such deglycosylation may increase the affinity or avidity of the antibody or fragment for antigen. See, e.g., U.S. Pat. Nos. 5,714,350 and 6,350,861.

[0136] Antibodies and antigen-binding fragments disclosed herein may further include those produced in lower eukaryote host cells, in particular fungal host cells such as yeast and filamentous fungi have been genetically engineered to produce glycoproteins that have mammalian- or human-like glycosylation patterns (See for example, Choi et al, (2003) Proc. Natl. Acad. Sci. 100:5022-5027; Hamilton et al., (2003) Science 301:1244-1246; Hamilton et al., (2006) Science 313:1441-1443; Nett et al., Yeast 28 (3): 237-52 (2011); Hamilton et al., Curr Opin Biotechnol. 18 (5): 387-92 (2007)). A particular advantage of these genetically modified host cells over currently used mammalian cell lines is the ability to control the glycosylation profile of glycoproteins that are produced in the cells such that compositions of glycoproteins can be produced wherein a particular N-glycan structure predominates (see, e.g., U.S. Pat. Nos. 7,029,872 and 7,449,308). These genetically modified host cells have been used to produce antibodies that have predominantly particular N-glycan structures (See for example, Li et al., (2006) Nat. Biotechnol. 24:210-215).

[0137] In particular embodiments, the antibodies and antigen-binding fragments thereof disclosed herein further include those produced in lower eukaryotic host cells and which comprise fucosylated and non-fucosylated hybrid and complex N-glycans, including bisected and multiantennary species, including but not limited to N-glycans such as GlcNAc₍₁₋₄₎Man₃GlcNAc₂; Gal₍₁₋₄₎GlcNAc₍₁₋₄₎Man₃GlcNAc₂; NANA₍₁₋₄₎Gal₍₁₋₄₎GlcNAc₍₁₋₄₎Man₃GlcNAc₂.

[0138] In particular embodiments, the antibodies and antigen-binding fragments thereof provided herein may comprise antibodies or fragments having at least one hybrid N-glycan selected from the group consisting of GlcNAcMan₅GlcNAc₂; GalGlcNAcMan₅GlcNAc₂; and NANAGalGlcNAcMan₅GlcNAc₂. In particular aspects, the hybrid N-glycan is the predominant N-glycan species in the composition.

[0139] In particular embodiments, the antibodies and antigen-binding fragments thereof provided herein comprise antibodies and fragments having at least one complex N-glycan selected from the group consisting of GlcNAcMan₃GlcNAc₂; GalGlcNAcMan₃GlcNAc₂; NANAGalGlcNAcMan₃GlcNAc₂; GlcNAc₂Man₃GlcNAc₂; GalGlcNAc₂Man₃GlcNAc₂; Gal₂GlcNAc₂Man₃GlcNAc₂; NANAGal₂GlcNAc₂Man₃GlcNAc₂; and NANA₂Gal₂GlcNAc₂Man₃GlcNAc₂. In particular aspects, the complex N-glycan are the predominant N-glycan species in the composition. In further aspects, the complex N-glycan is a particular N-glycan species that comprises about 30%, 40%, 50%, 60%, 70%, 80%, 90%, 95%, 97%, 98%, 99%, or 100% of the complex N-glycans in the composition. In one embodiment, the antibody and antigen binding fragments thereof provided herein comprise complex N-glycans, wherein at least 50%, 60%, 70%, 80%, 90%, 95%, 97%, 98%, 99%, or 100% of the complex N-glycans comprise the structure NANA₂Gal₂GlcNAc₂Man₃GlcNAc₂, wherein such structure is afucosylated. Such structures can be produced, e.g., in engineered Pichia pastoris host cells.

[0140] In particular embodiments, the N-glycan is fucosylated. In general, the fucose is in an α1,3-linkage with the GlcNAc at the reducing end of the N-glycan, an α1,6-linkage with the GlcNAc at the reducing end of the N-glycan, an α1,2-linkage with the Gal at the non-reducing end of the N-glycan, an α1,3-linkage with the GlcNac at the non-reducing end of the N-glycan, or an α1,4-linkage with a GlcNAc at the non-reducing end of the N-glycan.

[0141] Therefore, in particular aspects of the above the glycoprotein compositions, the glycoform is in an α1,3-linkage or α1,6-linkage fucose to produce a glycoform selected from the group consisting of Man₅GlcNAc₂(Fuc), GlcNAcMan₅GlcNAc₂(Fuc), Man₃GlcNAC₂(Fuc), GlcNAcMan₃GlcNAC₂(Fuc), GlcNAc₂Man₃GlcNAc₂(Fuc), GalGlcNAc₂Man₃GlcNAC₂(Fuc), Gal₂GlcNAc₂Man₃GlcNAC₂(Fuc), NANAGal₂GlcNAc₂Man₃GlcNAC₂(Fuc), and NANA₂Gal₂GlcNAc₂Man₃GlcNAc₂(Fuc); in an α1,3-linkage or α1,4-linkage fucose to produce a glycoform selected from the group consisting of GlcNAc(Fuc)MansGlcNAc₂, GlcNAc(Fuc)Man₃GlcNAc₂, GlcNAc₂(Fuc₁₋₂)Man₃GlcNAc₂, GalGlcNAC₂(Fuc₁₋₂)Man₃GlcNAc₂, Gal₂GlcNAc₂(Fuc₁₋₂)Man₃GlcNAc₂, NANAGal₂GlcNAc₂(Fuc₁₋₂)Man₃GlcNAc₂, and NANA₂Gal₂GlcNAC₂(Fuc₁₋₂)Man₃GlcNAc₂; or in an a_{1,2}-linkage fucose to produce a glycoform selected from the group consisting of Gal(Fuc)GlcNAc₂Man₃GlcNAc₂, Gal₂(Fuc₁₋₂) GlcNAc₂Man₃GlcNAc₂, NANAGal₂(Fuc₁₋₂) GlcNAc₂Man₃GlcNAc₂, and NANA₂Gal₂(Fuc₁₋₂) GlcNAc₂Man₃GlcNAC₂.

[0142] In further aspects, the antibodies (e.g., humanized antibodies) or antigen-binding fragments thereof comprise high mannose N-glycans, including but not limited to, Man₈GlcNAC₂, Man₇GlcNAc₂, Man₆GlcNAc₂, Man₅GlcNAc₂, Man₄GlcNAc₂, or N-glycans that consist of the Man₃GlcNAc₂ N-glycan structure.

[0143] In further aspects of the above, the complex N-glycans further include fucosylated and non-fucosylated bisected and multiantennary species.

[0144] As used herein, the terms “N-glycan” and “glycoform” are used interchangeably and refer to an N-linked oligosaccharide, for example, one that is attached by an asparagine-N-acetylglucosamine linkage to an asparagine residue of a polypeptide. N-linked glycoproteins contain an N-acetylglucosamine residue linked to the amide nitrogen of an asparagine residue in the protein. The predominant sugars found on glycoproteins are glucose, galactose, mannose, fucose, N-acetylgalactosamine (GalNAc), N-acetylglucosamine (GlcNAc) and sialic acid (e.g., N-acetyl-neuraminic acid (NANA)). The processing of the sugar groups occurs co-translationally in the lumen of the ER and continues post-translationally in the Golgi apparatus for N-linked glycoproteins.

[0145] N-glycans have a common pentasaccharide core of Man₃GlcNAc₂ (“Man” refers to mannose; “Glc” refers to glucose; and “NAc” refers to N-acetyl; GlcNAc refers to N-acetylglucosamine). Usually, N-glycan structures are presented with the non-reducing end to the left and the reducing end to the right. The reducing end of the N-glycan is the end that is attached to the Asn residue comprising the glycosylation site on the protein. N-glycans differ with respect to the number of branches (antennae) comprising peripheral sugars (e.g., GlcNAc, galactose, fucose and sialic acid) that are added to the Man₃GlcNAC₂ (“Man3”) core structure which is also referred to as the “trimannose core”, the “pentasaccharide core” or the “paucimannose core”. N-glycans are classified according to their branched constituents (e.g., high mannose, complex or hybrid). A “high mannose” type N-glycan has five or more mannose residues. A “complex” type N-glycan typically has at least one GlcNAc attached to the 1,3 mannose arm and at least one GlcNAc attached to the 1,6 mannose arm of a “trimannose” core. Complex N-glycans may also have galactose (“Gal”) or N-acetylgalactosamine (“GalNAc”) residues that are optionally modified with sialic acid or derivatives (e.g., “NANA” or “NeuAc”, where “Neu” refers to neuraminic acid and “Ac” refers to acetyl). Complex N-glycans may also have intrachain substitutions comprising “bisecting” GlcNAc and core fucose (“Fuc”). Complex N-glycans may also have multiple antennae on the “trimannose core,” often referred to as “multiple antennary glycans.” A “hybrid” N-glycan has at least one GlcNAc on the terminal of the 1,3 mannose arm of the trimannose core and zero or more mannoses on the 1,6 mannose arm of the trimannose core. The various N-glycans are also referred to as “glycoforms.”

[0146] With respect to complex N-glycans, the terms “G-2”, “G-1”, “G0”, “G1”, “G2”, “A1”, and “A2” mean the following. “G-2” refers to an N-glycan structure that can be characterized as Man₃ GlcNAc₂; the term “G-1” refers to an N-glycan structure that can be characterized as GlcNAcMan₃GlcNAc₂; the term “G0” refers to an N-glycan structure that can be characterized as GlcNAc₂Man₃GlcNAc₂; the term “G1” refers to an N-glycan structure that can be characterized as GalGlcNAc₂Man₃GlcNAc₂; the term “G2” refers to an N-glycan structure that can be characterized as Gal₂GlcNAc₂Man₃GlcNAc₂; the term “A1” refers to an N-glycan structure that can be characterized as NANAGal₂GlcNAc₂Man₃GlcNAc₂; and, the term “A2” refers to an N-glycan structure that can be characterized as NANA₂Gal₂GlcNAc₂Man₃GlcNAc₂. Unless otherwise indicated, the terms G-2”, “G-1”, “G0”, “G1”, “G2”, “A1”, and “A2” refer to N-glycan species that lack fucose attached to the GlcNAc residue at the reducing end of the N-glycan. When the term includes an “F”, the “F” indicates that the N-glycan species contains a fucose residue on the GlcNAc residue at the reducing end of the N-glycan. For example, G0F, G1F, G2F, A1F, and A2F all indicate that the N-glycan further includes a fucose residue attached to the GlcNAc residue at the reducing end of the N-glycan. Lower eukaryotes such as yeast and filamentous fungi do not normally produce N-glycans that produce fucose.

[0147] With respect to multiantennary N-glycans, the term “multiantennary N-glycan” refers to N-glycans that further comprise a GlcNAc residue on the mannose residue comprising the non-reducing end of the 1,6 arm or the 1,3 arm of the N-glycan or a GlcNAc residue on each of the mannose residues comprising the non-reducing end of the 1,6 arm and the 1,3 arm of the N-glycan. Thus, multiantennary N-glycans can be characterized by the formulas GlcNAc₍₂₋₄₎Man₃GlcNAc₂, Gal₍₁₋₄₎GlcNAc₍₂₋₄)Man₃GlcNAc₂, or NANA₍₁₋₄₎Gal₍₁₋₄₎GlcNAc₍₂₋₄₎Man₃GlcNAc₂. The term “1-4” refers to 1, 2, 3, or 4 residues.

[0148] With respect to bisected N-glycans, the term “bisected N-glycan” refers to N-glycans in which a GlcNAc residue is linked to the mannose residue at the reducing end of the N-glycan. A bisected N-glycan can be characterized by the formula GlcNAc₃Man₃GlcNAc₂ wherein each mannose residue is linked at its non-reducing end to a GlcNAc residue. In contrast, when a multiantennary N-glycan is characterized as GlcNAc₃Man₃GlcNAc₂, the formula indicates that two GlcNAc residues are linked to the mannose residue at the non-reducing end of one of the two arms of the N-glycans and one GlcNAc residue is linked to the mannose residue at the non-reducing end of the other arm of the N-glycan.

[0149] In certain embodiments, the proteins of the invention comprise an aglycosylated Fc region. By way of example, an IgG1 Fc region may be aglycosylayed by deleting or substituting residue N297.

### Antibody Physical Properties

[0150] The antibodies and antigen-binding fragments thereof disclosed herein may further contain one or more glycosylation sites in either the light or heavy chain immunoglobulin variable region. Such glycosylation sites may result in increased immunogenicity of the antibody or fragment or an alteration of the pK of the antibody due to altered antigen-binding (Marshall et al. (1972) Annu Rev Biochem 41:673-702; Gala and Morrison (2004) J Immunol 172:5489-94; Wallick et al (1988) J Exp Med 168:1099-109; Spiro (2002) Glycobiology 12: 43R-56R; Parekh et al (1985) Nature 316:452-7; Mimura et al. (2000) Mol Immunol 37:697-706). Glycosylation has been known to occur at motifs containing an N-X-S/T sequence.

[0151] Each antibody or antigen-binding fragment will have a unique isoelectric point (pI), which generally falls in the pH range between 6 and 9.5. The pI for an IgG1 antibody typically falls within the pH range of 7-9.5 and the pI for an IgG4 antibody typically falls within the pH range of 6-8.

[0152] Each antibody or antigen-binding fragment will have a characteristic melting temperature, with a higher melting temperature indicating greater overall stability in vivo (Krishnamurthy R and Manning MC (2002) Curr Pharm Biotechnol 3:361-71). In general, the T_{M1} (the temperature of initial unfolding) may be greater than 60° C., greater than 65° C., or greater than 70° C. The melting point of an antibody or fragment can be measured using differential scanning calorimetry (Chen et al (2003) Pharm Res 20:1952-60; Ghirlando et al (1999) Immunol Lett 68:47-52) or circular dichroism (Murray et al. (2002) J. Chromatogr Sci 40:343-9).

[0153] In a further embodiment, antibodies and antigen-binding fragments thereof are selected that do not degrade rapidly. Degradation of an antibody or fragment can be measured using capillary electrophoresis (CE) and MALDI-MS (Alexander A J and Hughes D E (1995) Anal Chem 67:3626-32).

[0154] In a further embodiment, antibodies and antigen-binding fragments thereof are selected that have minimal aggregation effects, which can lead to the triggering of an unwanted immune response and/or altered or unfavorable pharmacokinetic properties. Generally, antibodies and fragments are acceptable with aggregation of 25% or less, 20% or less, 15% or less, 10% or less, or 5% or less. Aggregation can be measured by several techniques, including size-exclusion column (SEC), high performance liquid chromatography (HPLC), and light scattering.

### Antibody Conjugates

[0155] The anti-LY6G6D antibodies and antigen-binding fragments thereof disclosed herein may also be conjugated to a chemical moiety. The chemical moiety may be, inter alia, a polymer, a radionucleotide or a cytotoxic factor. In particular embodiments, the chemical moiety is a polymer which increases the half-life of the antibody or fragment in the body of a subject. Suitable polymers include, but are not limited to, hydrophilic polymers which include but are not limited to polyethylene glycol (PEG) (e.g., PEG with a molecular weight of 2 kDa, 5 kDa, 10 kDa, 12 kDa, 20 kDa, 30 kDa or 40 kDa), dextran and monomethoxypolyethylene glycol (mPEG). Lee, et al., (1999) (Bioconj. Chem. 10:973-981) discloses PEG conjugated single-chain antibodies. Wen, et al., (2001) (Bioconj. Chem. 12:545-553) disclose conjugating antibodies with PEG which is attached to a radiometal chelator (diethylenetriaminpentaacetic acid (DTPA)).

[0156] The antibodies and antigen-binding fragments thereof disclosed herein may also be conjugated with labels such as ⁹⁹Tc, ^{99m}Tc, ⁸⁶Y, ⁸⁸Y, ⁹⁰Y, ¹¹¹In, ³²P, ¹⁴C, ¹²³I, ¹²⁴I, ¹²⁵I, ³H, ¹³¹I, ¹¹C, ¹⁵O, ¹³N, ¹⁸F, ¹⁹F, ³⁵S, ⁵¹Cr, ⁵⁷To, ²²⁶Ra, ⁶⁰Co, ⁵⁹Fe, ⁵⁷Se, ¹⁵²Eu, ⁶¹Cu, ⁶²Cu, ⁶⁴Cu, ⁶⁷Cu, ⁶⁶Ga, ⁶⁷Ga, ⁶⁸Ga, ⁷²Ga, ⁴⁵Ti, ⁸⁹Zr, ²¹⁷Ci, ²¹¹ At, ²¹²Pb, ¹⁷⁷Lu, ⁴⁴Sc, ⁴⁷Sc, ¹⁰⁹Pd, ²³⁴Th, and ⁴⁰K, ¹⁵⁷Gd, ⁵⁵Mn, ⁵²Tr, and ⁵⁶Fe.

[0157] The antibodies and antigen-binding fragments disclosed herein may also be PEGylated, for example to increase its biological (e.g., serum) half-life. To PEGylate an antibody or fragment, the antibody or fragment, typically is reacted with a reactive form of polyethylene glycol (PEG), such as a reactive ester or aldehyde derivative of PEG, under conditions in which one or more PEG groups become attached to the antibody or antibody fragment. In particular embodiments, the PEGylation is carried out via an acylation reaction or an alkylation reaction with a reactive PEG molecule (or an analogous reactive water-soluble polymer). As used herein, the term “polyethylene glycol” is intended to encompass any of the forms of PEG that have been used to derivatize other proteins, such as mono (C1-C10) alkoxy- or aryloxy-polyethylene glycol or polyethylene glycol-maleimide. In certain embodiments, the antibody or fragment to be PEGylated is an aglycosylated antibody or fragment. Methods for PEGylating proteins are known in the art and can be applied to the antibodies of the invention. See, e.g., EP 0 154 316 and EP 0 401 384.

[0158] The antibodies and antigen-binding fragments disclosed herein may also be conjugated with fluorescent or chemilluminescent labels, including fluorophores such as rare earth chelates, fluorescein and its derivatives, rhodamine and its derivatives, isothiocyanate, phycoerythrin, phycocyanin, allophycocyanin, o-phthaladehyde, fluorescamine, ¹⁵²Eu, dansyl, umbelliferone, luciferin, luminal label, isoluminal label, an aromatic acridinium ester label, an imidazole label, an acridimium salt label, an oxalate ester label, an aequorin label, 2,3-dihydrophthalazinediones, biotin/avidin, spin labels and stable free radicals.

[0159] The antibodies and antigen-binding fragments thereof of the invention may also be conjugated to a cytotoxic factor such as diptheria toxin, Pseudomonas aeruginosa exotoxin A chain, ricin A chain, abrin A chain, modeccin A chain, alpha-sarcin, Aleurites fordii proteins and compounds (e.g., fatty acids), dianthin proteins, Phytoiacca americana proteins PAPI, PAPII, and PAP-S, Momordica charantia inhibitor, curcin, crotin, Saponaria officinalis inhibitor, mitogellin, restrictocin, phenomycin, and enomycin.

[0160] The antibodies and antigen-binding fragments herein may be detectably labeled using paramagnetic chelates, microparticles, superparamagnetic particles; incorporated into ultrasound bubbles, microparticles, microspheres, emulsions, etc.

[0161] A metal chelator(s) is a molecule having one or more polar groups that act as a ligand for, and complex with, a paramagnetic metal. Suitable chelators are known in the art and include acids with methylene phosphonic acid groups, methylene carbohydroxamine acid groups, carboxyethylidene groups, or carboxymethylene groups. Examples of chelators include, but are not limited to, diethylenetriaminepentaacetic acid (DTPA), 1,4,7,10-tetraazacyclo-tetradecane-1,4,7,10-tetraacetic acid (DOTA), 1-substituted 1,4,7,-tricarboxymethyl-1,4,7,10-teraazacyclododecane (DO3A), ethylenediaminetetraacetic acid (EDTA), and 1,4,8,11-tetra-azacyclotetradecane-1,4,8,11-tetraacetic acid (TETA). Additional chelating ligands are ethylene bis-(2-hydroxy-phenylglycine) (EHPG), and derivatives thereof, including 5-C1-EHPG, 5Br-EHPG, 5-Me-EHPG, 5t-Bu-EHPG, and 5 sec-Bu-EHPG; benzodiethylenetriamine pentaacetic acid (benzo-DTPA) and derivatives thereof, including dibenzo-DTPA, phenyl-DTPA, diphenyl-DTPA, benzyl-DTPA, and dibenzyl DTPA; bis-2 (hydroxybenzyl)-ethylene-diaminediacetic acid (HBED) and derivatives thereof; the class of macrocyclic compounds, which contain at least 3 carbon atoms, more preferably at least 6, and at least two heteroatoms (O and/or N), which macrocyclic compounds can consist of one ring, or two or three rings joined together at the hetero ring elements, e.g., benzo-DOTA, dibenzo-DOTA, and benzo-NOTA, where NOTA is 1,4,7-triazacyclononane N,N′,N″-triacetic acid, benzo-TETA, benzo-DOTMA, where DOTMA is 1,4,7,10-tetraazacyclotetradecane-1,4,7,10-tetra(methyl tetraacetic acid), and benzo-TETMA, where TETMA is 1,4,8,11-tetraazacyclotetradecane-1,4,8,11-(methyl tetraacetic acid); derivatives of 1,3-propylene-diaminetetraacetic acid (PDTA) and triethylenetetraaminehexaacetic acid (TTHA); derivatives of 1,5,10-N,N′,N″-tris(2,3-dihydroxybenzoyl)-tricatecholate (LICAM); and 1,3,5-N,N′,N″-tris(2,3-dihydroxybenzoyl)aminomethylbenzene (MECAM). Examples of representative chelators and chelating groups contemplated by the present invention are described in WO 98/18496, WO 86/06605, WO 91/03200, WO 95/28179, WO 96/23526, WO 97/36619, PCT/US98/01473, PCT/US98/20182, and U.S. Pat. Nos. 4,899,755, 5,474,756, 5,846,519 and 6,143,274, all of which are hereby incorporated by reference.

[0162] Any method known in the art for conjugating the antibodies and antigen-binding fragments thereof of the invention to the various moieties may be employed, including those methods described by Hunter, et al., (1962) Nature 144:945; David, et al., (1974) Biochemistry 13:1014; Pain, et al., (1981) J. Immunol. Meth. 40:219; and Nygren, J., (1982) Histochem. and Cytochem. 30:407. Methods for conjugating antibodies and fragments are conventional and very well known in the art.

[0163] Chemical cross-linkers may be classified on the basis of the following:
[0164] 1. Functional groups and chemical specificity;
[0165] 2. length and composition of the cross-bridge;
[0166] 3. whether the cross-linking groups are similar (homobifunctional) or different (heterobifunctional);
[0167] 4. whether the groups react chemically or photochemically;
[0168] 5. whether the reagent is cleavable; and
[0169] 6. whether the reagent can be radiolabeled or tagged with another label.

[0170] Reactive groups on antibodies and labels that can be targeted using a cross-linker include primary amines, carbonyls, carbohydrates and carboxylic acids. In addition, many reactive groups can be coupled nonselectively using a cross-linker such as photoreactive phenyl azides. For suitable reagents, see Pierce 2003-2004 Applications Handbook and Catalog #1600926, which is hereby incorporated by reference.

[0171] Many factors must be considered to determine optimum cross-linker-to-target molar ratios. Depending on the application, the degree of conjugation is an important factor. For example, when preparing immunogen conjugates, a high degree of conjugation is normally desired to increase the immunogenicity of the antigen. However, when conjugating to an antibody or an enzyme, a low-to-moderate degree of conjugation may be optimal to ensure that the biological activity of the protein is retained. It is also important to consider the number of reactive groups on the surface of the protein. If there are numerous target groups, a lower cross-linker-to-protein ratio can be used. For a limited number of potential targets, a higher cross-linker-to-protein ratio may be required. This translates into more cross-linker per gram for a small molecular weight protein.

[0172] Conformational changes of proteins associated with a particular interaction may also be analyzed by performing cross-linking studies before and after the interaction. A comparison is made by using different arm-length cross-linkers and analyzing the success of conjugation. The use of cross-linkers with different reactive groups and/or spacer arms may be desirable when the conformation of the protein changes such that hindered amino acids become available for cross-linking.

[0173] Cross-linkers are available with varying lengths of spacer arms or bridges connecting the reactive ends. The most apparent attribute of the bridge is its ability to deal with steric considerations of the moieties to be linked. Because steric effects dictate the distance between potential reaction sites for cross-linking, different lengths of bridges may be considered for the interaction. Shorter spacer arms are often used in intramolecular cross-linking studies, while intermolecular cross-linking is favored with a cross-linker containing a longer spacer arm.

[0174] The inclusion of polymer portions (e.g., polyethylene glycol (“PEG”) homopolymers, polypropylene glycol homopolymers, other alkyl-polyethylene oxides, bis-polyethylene oxides and co-polymers or block co-polymers of poly(alkylene oxides)) in cross-linkers can, under certain circumstances be advantageous. See, e.g., U.S. Pat. Nos. 5,643,575, 5,672,662, 5,705,153, 5,730,990, 5,902,588, and 5,932,462; and Topchieva et al., Bioconjug. Chem. 6:380-8, 1995). For example, U.S. Pat. No. 5,672,662 discloses bifunctional cross-linkers comprising a PEG polymer portion and a single ester linkage. Such molecules are said to provide a half-life of about 10 to 25 minutes in water.

[0175] Designing a cross-linker involves selection of the functional moieties to be employed. The choice of functional moieties is entirely dependent upon the target sites available on the species to be crosslinked. Some species (e.g., proteins) may present a number of available sites for targeting (e.g., lysine ¿-amino groups, cysteine sulfhydryl groups, glutamic acid carboxyl groups, etc.), and selection of a particular functional moiety may be made empirically in order to best preserve a biological property of interest (e.g., binding affinity of an antibody, catalytic activity of an enzyme, etc.)

### Coupling Through Amine Groups

[0176] Imidoester and N-hydroxysuccinimidyl (“NHS”) esters are typically employed as amine-specific functional moieties. NHS esters yield stable products upon reaction with primary or secondary amines. Coupling is efficient at physiological pH, and NHS-ester cross-linkers are more stable in solution than their imidate counterparts. Homobifunctional NHS-ester conjugations are commonly used to cross-link amine-containing proteins in either one-step or two-step reactions. Primary amines are the principal targets for NHS-esters. Accessible α-amine groups present on the N-termini of proteins react with NHS-esters to form amides. However, because α-amines on a protein are not always available, the reaction with side chains of amino acids become important. While five amino acids have nitrogen in their side chains, only the ε-amino group of lysine reacts significantly with NHS-esters. A covalent amide bond is formed when the NHS-ester cross-linking agent reacts with primary amines, releasing N-hydroxysuccinimide.

### Coupling Through Sulfhydryl Groups

[0177] Maleimides, alkyl and aryl halides, α-haloacyls, and pyridyl disulfides are typically employed as sulfhydryl-specific functional moieties. The maleimide group is specific for sulfhydryl groups when the pH of the reaction mixture is kept between pH 6.5 and 7.5. At pH 7, the reaction of the maleimides with sulfhydryls is 1000-fold faster than with amines. Maleimides do not react with tyrosines, histidines or methionines. When free sulfhydryls are not present in sufficient quantities, they can often be generated by reduction of available disulfide bonds.

### Coupling Through Carboxyl Groups

[0178] Carbodiimides couple carboxyls to primary amines or hydrazides, resulting in formation of amide or hydrazone bonds. Carbodiimides are unlike other conjugation reactions in that no cross-bridge is formed between the carbodiimide and the molecules being coupled; rather, a peptide bond is formed between an available carboxyl group and an available amine group. Carboxy termini of proteins can be targeted, as well as glutamic and aspartic acid side chains. In the presence of excess cross-linker, polymerization may occur because proteins contain both carboxyls and amines. No cross-bridge is formed, and the amide bond is the same as a peptide bond, so reversal of the cross-linking is impossible without destruction of the protein.

### Nonselective Labeling

[0179] A photoaffinity reagent is a compound that is chemically inert but becomes reactive when exposed to ultraviolet or visible light. Arylazides are photoaffinity reagents that are photolyzed at wavelengths between 250-460 nm, forming a reactive aryl nitrene. The aryl nitrene reacts nonselectively to form a covalent bond. Reducing agents must be used with caution because they can reduce the azido group.

### Carbonyl Specific Cross-Linkers

[0180] Carbonyls (aldehydes and ketones) react with amines and hydrazides at pH 5-7. The reaction with hydrazides is faster than with amines, making this useful for site-specific cross-linking. Carbonyls do not readily exist in proteins; however, mild oxidation of sugar moieties using sodium metaperiodate will convert vicinal hydroxyls to aldehydes or ketones.

### Additional Immunoglobulin Variable Regions

[0181] The target binding proteins of the invention may comprise one or more immunoglobulin variable regions in addition to the hLY6G6D-binding domain described herein. In some embodiments, the target binding protein may comprise an additional light chain variable domain and an additional heavy chain variable domain. The additional light chain variable domain and the additional heavy chain variable domain may form an additional immunoglobulin variable region. Tn some examples, the hLY6G6D-binding domain and the additional immunoglobulin variable region may be identical. In some examples, the HLY6G6D-binding domain and the additional immunoglobulin variable region may be different from each other (e.g., may specifically bind to the same or different antigens or epitopes).

[0182] In some embodiments, the hLY6G6D-binding domain and the additional immunoglobulin variable region may be both Fv fragments, or at least one may be a Fv fragment. In some embodiments, the hLY6G6D-binding domain and the additional immunoglobulin variable region may be both Fab fragments, or at least one may be a Fab fragment. In some embodiment, the hLY6G6D-binding domain and an additional immunoglobulin variable region may be a Fab′ fragment, or at least one can be a Fab′ fragment.

[0183] In some embodiments, the target binding protein may be multispecific (e.g., bispecific, trispecific, tetraspecific, and other multispecific target binding proteins), e.g., binding to hLY6G6D and one or more additional targets. In some embodiments, the multispecific target binding protein may be multivalent, e g, comprising multiple target binding sites regardless of whether the binding sites recognize the same or different targets. In some embodiment, the target binding protein may be bispecific. The term “bispecific” means that target binding protein is able to specifically bind to two distinct targets. Typically, a bispecific target binding protein comprises two immunoglobulin variable regions, each of which is capable of specifically binding to a different target. In some embodiments, the bispecific target binding protein may be capable of simultaneously binding two targets, e.g., two target proteins expressed on two distinct cells.

[0184] In some embodiments, the target binding protein may comprise the hLY6G6D-binding domain and an additional immunoglobulin variable region capable of binding to a molecule on the surface of a cell associated with a disease (e.g., a tumor cell). Such target binding proteins may simultaneously bind to an immune cell (e.g., T cell) and a cell associated with a disease (e.g., a tumor cell), thus activating the immune cell and crosslinking the activated immune cell to the cell associated with the disease. In some embodiments, the target binding protein may be formulated as part of chimeric antigen receptor (CAR), a T cell engaging antibody (e.g., bispecific T cell engaging antibody or BiTE), a pro-Bispecific T Cell Engager (pro-BiTE) molecule, pro-Chimeric Antigen Receptor (pro-CAR) modified T cell, or other engineered receptor or other immune effector cell, such as a CAR modified NK cell.

[0185] In some examples, the target binding protein may be a monovalent bispecific antibody comprising the hLY6G6D-binding immunoglobulin variable region and an additional immunoglobulin variable region described herein. As used herein, the term “monovalent bispecific antibody” refers to a bispecific antibody, in which only one antigen-binding domain is directed against a given target. The inventors have surprisingly discovered that certain hLY6G6D-binding domains described herein display improved stability, manufacturability, and/or hLY6G6D binding affinity in the context of a monovalent hLY6G6D binding protein, including monovalent bispecific antibodies that specifically bind hLY6G6D (e.g., an anti-hLY6G6D scFv).

[0186] The target of the additional immunoglobulin variable region may be a protein or other type of molecules, e.g., cell surface receptors and secreted binding proteins (e.g., growth factors), soluble enzymes, structural proteins (e.g. collagen, fibronectin) and the like.

[0187] In some examples, the additional immunoglobulin variable region may bind to a target that is a molecule on or inside a cell that is associated with a disease. For example, the additional immunoglobulin variable region may bind to a tumor cell. In such cases, the additional immunoglobulin variable region may bind to a tumor associated antigen. As used herein, the term “tumor associated antigen” refers to any antigen including a protein, glycoprotein, ganglioside, carbohydrate, lipid that is associated with cancer. Such antigen may be expressed on tumor cells (e.g., malignant cells) or in the tumor microenvironment such as on tumor-associated blood vessels, extracellular matrix, mesenchymal stroma, or immune infiltrates. In some embodiments, the tumor associated antigen may be human epidermal growth factor receptor 2 (HER2). For example, the additional target binding domain may be trastuzumab or a fragment thereof. In another example, the additional immunoglobulin variable region may be pertuzumab or a fragment thereof.

[0188] Many techniques for making bispecific antibodies are known to those skilled in the art. In some embodiments, a bispecific antibody comprises heavy chain constant regions with modifications in the amino acids that are part of the interface between the two heavy chains. These modifications are made to enhance heterodimer formation and generally reduce or eliminate homodimer formation. In some embodiments, the bispecific antibody is generated using a knobs-into-holes (KIH) strategy. In some embodiments, the bispecific antibody comprises variant hinge regions incapable of forming disulfide linkages between identical heavy chains (e.g., reduce homodimer formation). In some embodiments, the bispecific antibody comprises heavy chains with changes in amino acids that result in altered electrostatic interactions. In some embodiments, the bispecific antibodies comprise heavy chains with changes in amino acids that result in altered hydrophobic/hydrophilic interactions.

### Activatable Target Binding Proteins

[0189] In one aspect, the target binding proteins herein include activatable target binding proteins. In general, an activatable target binding protein may comprise a prodomain, which refers to a polypeptide that, when linked to a target binding protein, functions to inhibit target binding by the target binding protein and includes an amino acid sequence that form a protease cleavable substrate. The portion of the prodomain that inhibits target binding is referred to as a masking moiety (MM) and the amino acid sequence that is a protease cleavable substrate is referred to as a cleavable moiety (CM). The prodomain may include a linker (L) between the MM and the CM and/or at the prodomain's terminus (e.g., carboxyl and/or amino terminus to facilitate the linkage of the prodomain to the target binding protein). In certain embodiments, a prodomain may comprise one of the following formulae (representing an amino acid sequence in an N- to C-terminal direction): MM-CM, MM-L-CM, MM-CM-L, MM-L-CM-L, CM-MM, CM-L-MM, L-CM-MM, or L-CM-L-MM, wherein each represents a direct or indirect (e.g., via a linker) linkage.

[0190] As used herein, the term “activatable target binding protein” refers to a target binding protein in its inactive (uncleaved or native) state. It will be apparent to the ordinarily skilled artisan that in some embodiments a cleaved activatable target binding protein may be connected to a MM that is not reducing, inhibiting, or interfering with binding between the immunoglobulin variable region and its target. In some embodiments, a cleaved activatable target binding protein may lack a MM due to cleavage of the CM (e.g., by a protease), resulting in release of the MM. As used herein, the term “cleaved state” or “active state” refers to the condition of the activatable target binding proteins following cleavage of the CM by at least one protease. The term “uncleaved state” or “inactive state” refers to the condition of the activatable target binding proteins in the absence of cleavage of the CM by a protease.

[0191] By activatable is meant that the activatable target binding protein exhibits a first level of binding to a target when the activatable target binding protein is in an inhibited, masked or uncleaved state (i.e., a first conformation), and a second level of binding to the target in the uninhibited, unmasked and/or cleaved state (i.e., a second conformation), where the second level of target binding is greater than the first level of binding. In general, the access of target to the immunoglobulin variable region of the activatable target binding protein is greater in the presence of a cleaving agent capable of cleaving the CM, i.e., a protease, than in the absence of such a cleaving agent. Thus, when the activatable target binding protein is in the uncleaved state, the target binding domain is inhibited from target binding and can be masked from target binding (i.e., the first conformation is such that the immunoglobulin variable region cannot bind the target or is inhibited in binding the target), and in the cleaved state the immunoglobulin variable region is not inhibited or is unmasked to target binding.

[0192] In some embodiments, an activatable target binding protein may be designed by selecting an immunoglobulin variable region of interest and constructing the remainder of the activatable target binding protein so that, when conformationally constrained, the MM provides for masking of the immunoglobulin variable region or reduction of binding of the immunoglobulin variable region to its target. Structural design criteria can be to be taken into account to provide for this functional feature.

[0193] Activatable target binding proteins herein may exhibit an activatable phenotype of a desired dynamic range for target binding in an inhibited versus an uninhibited conformation. Dynamic range generally refers to a ratio of (a) a maximum detected level of a parameter under a first set of conditions to (b) a minimum detected value of that parameter under a second set of conditions. For example, in the context of an activatable target binding protein, the dynamic range refers to the ratio of (a) a maximum detected level of target protein binding to an activatable target binding protein in the presence of a protease capable of cleaving a CM in the activatable target binding proteins to (b) a minimum detected level of target protein binding to an activatable target binding protein in the absence of the protease. The dynamic range of an activatable target binding protein can be calculated as the ratio of the dissociation constant of an activatable target binding protein cleaving agent (e.g., enzyme) treatment to the dissociation constant of the activatable target binding proteins cleaving agent treatment. The greater the dynamic range of an activatable target binding protein, the better the activatable phenotype of the activatable target binding protein. Activatable target binding proteins having relatively higher dynamic range values (e.g., greater than 1) exhibit more desirable activatable phenotypes such that target protein binding by the activatable target binding proteins occurs to a greater extent (e.g., predominantly occurs) in the presence of a cleaving agent (e.g., enzyme) capable of cleaving the CM of the activatable target binding proteins than in the absence of a cleaving agent.

[0194] The activatable target binding protein herein may comprise a immunoglobulin variable region (TB), one or more masking moieties (MMs) reducing, inhibiting, or interfering with the binding of the immunoglobulin variable region to its target(s), one or more cleavable moieties (CMs) that couple the one or more MMs to the TB, and optionally one or more half-life extending moieties (EMs). In some embodiments, the activatable target binding protein may comprise the TB that specifically binds to hLY6G6D, and a masking moiety (MM) inhibiting the binding of the TB and hLY6G6D, wherein the MM is coupled to the TB via a cleavable moiety (CM) (either directly or indirectly, e.g., via one or more linkers). As used herein and unless otherwise stated, components of the activatable target binding protein that are “coupled” may be coupled either via a direct covalent linkage or indirect covalent linkage, e.g., via one or more linking peptides (also referred to as “linkers”), cleavable moieties, or other components of the activatable protein.

[0195] In some embodiments, the activatable target binding protein may comprise more than one immunoglobulin variable regions (TBs). For example, the activatable target binding protein may comprise the first TB that specifically binds to hLY6G6D, a first MM (MM1) inhibiting the binding of the TB1 and hLY6G6D, wherein the MM1 is coupled to the TB1 via a first cleavable moiety (CM1) (either directly or indirectly, e.g., via one or more linkers), a second immunoglobulin variable region (TB2) that specifically binds to a second target, a second masking moiety (MM2) inhibiting the binding of the TB2 and the second target, wherein the MM2 is coupled to the TB2 via a second cleavable moiety (CM2) (either directly or indirectly, e.g., via one or more linkers). The activatable target binding protein may further comprise a half-life extending moiety (EM). In one example, the activatable target binding protein comprise a scFv comprising the TB1.

### Masking Moieties (MMs)

[0196] The activatable target binding proteins herein may comprise one or more masking moieties (MMs) capable of interfering with the binding of the TBs to the targets. A masking moiety in an activatable molecule (that is not yet activated) “masks” or reduces or otherwise inhibits the binding of the immunoglobulin variable region to its target. In some embodiments, the coupling or modifying of target binding protein with a MM may inhibit the ability of the protein to specifically bind its target by means of inhibition known in the art (e.g., structural change and competition for antigen-binding domain). In some embodiments, the coupling or modifying of a target binding protein with a MM may effect a structural change that reduces or inhibits the ability of the protein to specifically bind its target. In some embodiments, the coupling or modifying of a target binding protein with a MM sterically blocks, reduces or inhibits the ability of the antigen-binding domain to specifically bind its target.

[0197] A MM may be coupled to a TB by a CM and optionally one or more linkers described herein. In some embodiments, when an activatable target binding protein is not activated, the MM prevents the TB from target binding; but when the activatable target binding protein is activated (when the CM is cleaved by a protease), the MMs does not substantially or significantly interfere with the TB's binding to the target.

[0198] In the activatable target binding protein, a MM interfering with the target binding of a TB may be coupled to the TB (either directly or indirectly, e.g., via one or more linkers). Alternatively, a MM interfering with the target binding of a TB may be coupled, either directly or indirectly, to a component of the activatable target binding protein that is not the TB. For example, the MM may be coupled, either directly or indirectly, to a different TB. In another example, the MM may be coupled, either directly or indirectly, with an EM. In either case, in the tertiary or quaternary structure of the activatable structure, the MM may be in a position (e.g., proximal to the TB to be masked) that allows the MM to mask the TB.

[0199] In some embodiments, a MM may interact with the TB, thus reducing or inhibiting the interaction between the TB and its binding partner. In some embodiments, the MM may comprise at least a partial or complete amino acid sequence of a naturally occurring binding partner of the TB. For example, the MM may be a fragment of a naturally occurring binding partner. The fragment may retain no more than 95%, 90%, 80%, 75%, 70%, 60%, 50%, 40%, 30%, 25%, or 20% nucleic acid or amino acid sequence homology to the naturally occurring binding partner. In some embodiments, the MM may be a cognate peptide of the TB. For example, the MM may comprise a sequence of the TB's epitope or a fragment thereof. The term “naturally occurring” as used herein as applied to an object refers to the fact that an object can be found in nature. For example, a polypeptide or polynucleotide sequence that is present in an organism (including viruses) that can be isolated from a source in nature and that has not been intentionally modified by man in the laboratory or otherwise is naturally occurring.

[0200] In some embodiments, the MM may comprise an amino acid sequence that is not naturally occurring or does not contain the amino acid sequence of a naturally occurring binding partner or target protein. In certain embodiments, the MM is not a natural binding partner of the TB. The MM may be a modified binding partner for the TB which contains amino acid changes that decrease affinity and/or avidity of binding to the TB. In some embodiments the MM may contain no or substantially no nucleic acid or amino acid homology to the TB's natural binding partner. In other embodiments the MM is no more than 5%, 10%, 15%, 20%, 25%, 30%, 35%, 40%, 45%, 50%, 55%, 60%, 65%, 70%, 75%, or 80% similar to the natural binding partner of the TB.

[0201] In some embodiments, the MM may not specifically bind to the TB, but still interfere with TB's binding to its binding partner through non-specific interactions such as steric hindrance. For example, the MM may be positioned in the activatable target binding protein such that the tertiary or quaternary structure of the activatable target binding protein allows the MM to mask the TB through charge-based interaction, thereby holding the MM in place to interfere with binding partner access to the TB. In some embodiments, the MM may have a dissociation constant for binding to the TB that is no more than the dissociation constant of the TB to the target. In some embodiments, the MM may not interfere or compete with the TB for binding to the target in a cleaved state.

[0202] The structural properties of the MMs may be selected according to factors such as the minimum amino acid sequence required for interference with protein binding to target, the target protein-protein binding pair of interest, the size of the TB, the presence or absence of linkers, and the like.

[0203] In some embodiments, the MM may be unique for the coupled TB. Examples of MMs include MMs that were specifically screened to bind a binding domain of the TB or fragment thereof (e.g., affinity masks). Methods for screening MMs to obtain MMs unique for the TB and those that specifically and/or selectively bind a binding domain of a binding partner/target are provided herein and can include protein display methods.

[0204] As used herein, the term “masking efficiency” refers to the activity (e.g., EC50) of the activatable target binding protein in the inactivated state divided by the activity of a control antibody, wherein the control antibody may be either cleavage product of the activatable target binding protein or the antibody or fragment thereof used as the TB of the activatable target binding protein. An activatable target binding protein having a reduced level of a TB activity may have a masking efficiency that is greater than 10. In some embodiments, the activatable target binding proteins described herein may have a masking efficiency that is greater than 10, 100, 1000, or 5000.

[0205] In some embodiments, the MM may be a polypeptide of about 2 to 50 amino acids in length. For example, the MM may be a polypeptide of from 2 to 40, from 2 to 30, from 2 to 20, from 2 to 10, from 5 to 15, from 10 to 20, from 15 to 25, from 20 to 30, from 25 to 35, from 30 to 40, from 35 to 45, from 40 to 50 amino acids in length. For example, the MM may be a polypeptide with 2, 3, 4, 5, 6, 7, 8, 9, 10, 11, 12, 13, 14, 15, 16, 17, 18, 19, 20, 21, 22, 23, 24, 25, 26, 27, 28, 29, 30, 31, 32, 33, 34, 35, 36, 37, 38, 39, 40, 41, 42, 43, 44, 45, 46, 47, 48, 49, or 50 amino acids in length. In some examples, the MM may be a polypeptide of more than 50 amino acids in length, e.g., 100, 200, 300, 400, 500, 600, 700, 800, or more amino acids.

[0206] In some embodiments, in an inactive state of the activatable target binding protein with an TB and an interfering MM, in the presence of the target of an TB, there is no binding or substantially no binding of the TB to the target, or no more than 0 001%, 0.01%, 0.1%, 1%, 2%, 3%, 4%, 5%, 6%, 7%, 8%, 9%, 10%, 15%, 20%, 25%, 30%, 35%, 40%, or 50% binding of the TB to its target, as compared to the binding of an counterpart antibody without the interfering MM, for at least 0.1, 0.5, 1, 2, 4, 6, 8, 12, 28, 24, 30, 36, 48, 60, 72, 84, 96 hours, or 5, 10, 15, 30, 45, 60, 90, 120, 150, 180 days, or 1, 2, 3, 4, 5, 6, 7, 8, 9, 10, 11, or 12 months when measured in vitro immunoabsorbent assay, e.g., as described in US20200308243A1.

[0207] The binding affinity of the TB towards the target or binding partner with an interfering MM may be at least 5, 10, 25, 50, 100, 250, 500, 1,000, 2,500, 5,000, 10,000, 50,000, 100,000, 500,000, 1,000,000, 5,000,000, 10,000,000, 50,000,000 times lower than the binding affinity of the TB towards its binding partner without an interfering MM, or between 5-10, 10-100, 10-1,000, 10-10,000, 10-100,000, 10-1,000,000, 10-10,000,000, 100-1,000, 100-10,000, 100-100,000, 100-1,000,000, 100-10,000,000, 1,000-10,000, 1,000-100,000, 1,000-1,000,000, 1000-10,000,000, 10,000-100,000, 10,000-1,000,000, 10,000-10,000,000, 100,000-1,000,000, or 100,000-10,000,000 times lower than the binding affinity of the TB towards its binding partner when there is no interfering MM.

[0208] The dissociation constant of the MM towards the TB it masks, may be greater than the dissociation constant of the TB towards the target. The dissociation constant of the MM towards the masked TB may be at least 5, 10, 25, 50, 100, 250, 500, 1,000, 2,500, 5,000, 10,000, 100,000, 1,000,000 or even 10,000,000 times greater than the dissociation constant of the TB towards the target. Conversely, the binding affinity of the MM towards the masked TB may be lower than the binding affinity of the TB towards the target. The binding affinity of MM towards the TB may be at least 5, 10, 25, 50, 100, 250, 500, 1,000, 2,500, 5,000, 10,000, 100,000, 1,000,000 or even 10,000,000 times lower than the binding affinity of the TB towards the target.

[0209] In some embodiments, the MMs may contain genetically encoded or genetically nonencoded amino acids. Examples of genetically non-encoded amino acids include but are not limited to D-amino acids, P-amino acids, and y-amino acids. In specific embodiments, the MMs contain no more than 50%, 40%, 30%, 20%, 15%, 10%, 5% or 1% of genetically non-encoded amino acids.

[0210] In some embodiments, once released from the activatable target binding protein and in a free state, the MM may have a biological activity or a therapeutic effect, such as binding capability. For example, the free peptide may bind with the same or a different binding partner. In certain embodiments, the free MM may exert a therapeutic effect, providing a secondary function to the compositions disclosed herein. In some embodiments, once uncoupled from the activatable target binding protein and in a free state, the MM may advantageously not exhibit biological activity. For example, in some embodiments the MM in a free state does not elicit an immune response in the subject.

[0211] Suitable MMs may be identified and/or further optimized through a screening procedure from a library of candidate activatable target binding proteins having variable MMs. For example, a TB and a CM may be selected to provide for a desired enzyme/target combination, and the amino acid sequence of the MM can be identified by the screening procedure described below to identify a MM that provides for a switchable phenotype. For example, a random peptide library (e.g., of peptides comprising 2 to 40 amino acids or more) may be used in the screening methods disclosed herein to identify a suitable MM.

[0212] In some embodiments, MMs with specific binding affinity for a TB may be identified through a screening procedure that includes providing a library of peptide scaffolds comprising candidate MMs wherein each scaffold is made up of a transmembrane protein and the candidate MM. The library may then be contacted with an entire or portion of a protein such as a full length protein, a naturally occurring protein fragment, or a non-naturally occurring fragment containing a protein (also capable of binding the binding partner of interest), and identifying one or more candidate MMs having detectably bound protein. The screening may be performed by one more rounds of magnetic-activated sorting (MACS) or fluorescence-activated sorting (FACS), as well as determination of the binding affinity of MM towards the TB and subsequent determination of the masking efficiency, e.g., as described in WO2009025846 and US20200308243A1, which are incorporated herein by reference in their entireties.

[0213] In some embodiments, a MM may be selected for use with a specific antibody or antibody fragment. For example, suitable MM for use with a TB that binds to an epitope may comprise the sequence of the epitope. In some examples, suitable MM for masking the anti-hLY6G6D binding proteins disclosed herein include MMs comprising the sequences of GYLWGCEWNCGGITT (SEQ ID NO: 2658), NAFRCWWDPPCQPMT (SEQ ID NO: 2659), ARGLCWWDPPCTHDL (SEQ ID NO: 2660), or NHSLCYWDPPCEPST (SEQ ID NO: 2661). Additional masking moieties for anti-hLY6G6D binding proteins include the sequences of MMYCGGNEVLCGPRV (SEQ ID NO: 2662), GYRWGCEWNCGGITT (SEQ ID NO: 2663), MMYCGGNEIFCEPRG (SEQ ID NO: 2664), GYGWGCEWNCGGSSP (SEQ ID NO: 2665), and MMYCGGNEIFCGPRG (SEQ ID NO: 2666).

[0214] Examples of suitable MMs are disclosed in WO2021207657, WO2021142029, WO2021061867, WO2020252349, WO2020252358, WO2020236679, WO2020176672, WO2020118109, WO2020092881, WO2020086665, WO2019213444, WO2019183218, WO2019173771, WO2019165143, WO2019075405, WO2019046652, WO2019018828, WO2019014586, WO2018222949, WO2018165619, WO2018085555, WO2017011580, WO2016179335, WO2016179285, WO2016179257, WO2016149201, and WO2016014974, which are incorporated herein by reference in their entireties.

### Cleavable Moieties (CMs)

[0215] The activatable target binding protein may comprise one or more cleavable moieties (CMs). The terms “cleavable moiety” and “CM” are used interchangeably herein to refer to a peptide, the amino acid sequence of which comprises a substrate for a sequence-specific protease. In some embodiments, the CM may be positioned between a TB and a MM.

[0216] The CM and the TB of the activatable target binding proteins may be selected so that the TB represents a binding moiety for a given target, and the CM represents a substrate for one or more proteases, where the protease is co-localized with the target in a tissue (e.g., at a treatment site or diagnostic site in a subject). The protease may cleave the CM in the activatable target binding protein when the activatable target binding protein is exposed to the protease. In some embodiments, the activatable target binding proteins may find particular use where, for example, one or more proteases capable of cleaving a site in the CM, is present at relatively higher levels in target-containing tissue of a treatment site or diagnostic site than in tissue of non-treatment sites (for example in healthy tissue).

[0217] In some embodiments, the CMs herein may comprise substrates for proteases that have known substrates have been reported in a number of cancers. See, e.g., La Roca et al., British J. Cancer 90 (7): 1414-1421, 2004. Substrates suitable for use in the CM components employed herein include those which are more prevalently found in cancerous cells and tissue. Thus, in certain embodiments, the CM may comprise a substrate for a protease that is more prevalently found in diseased tissue associated with a cancer. Examples of the cancers include gastric cancer, breast cancer, osteosarcoma, esophageal cancer, breast cancer, a HER2-positive cancer, Kaposi sarcoma, hairy cell leukemia, chronic myeloid leukemia (CML), follicular lymphoma, renal cell cancer (RCC), melanoma, neuroblastoma, basal cell carcinoma, cutaneous T-cell lymphoma, nasopharyngeal adenocarcinoma, ovarian cancer, bladder cancer, BCG-resistant nonmuscle invasive bladder cancer (NMIBC), endometrial cancer, pancreatic cancer, non-small cell lung cancer (NSCLC), colorectal cancer, esophageal cancer, gallbladder cancer, glioma, head and neck carcinoma, uterine cancer, cervical cancer, or testicular cancer, and the like. In some embodiments, the CM components comprise substrates for protease(s) that is/are more prevalent in tumor tissue. For example, the protease(s) may be produced by a tumor in a subject.

[0218] In some embodiments, the activatable target binding protein may comprise two CMs (e.g., for coupling MMs to multiple TBs). In some examples, the first and the second CMs may comprise the substrates of the same protease. In some examples, the first and the second CMs may comprise the substrates of different proteases. In some examples, the first and the second CMs may comprise or consist of the same sequence. In some examples, the first and the second CMs may comprise or consist of different sequences.

[0219] Suitable CMs for use in the activatable target binding protein herein include any of the protease substrates that are known the art. In some examples, the CM may comprise a substrate of a serine protease (e.g., u-type plasminogen activator (uPA, also referred to as urokinase), matriptase (also referred to herein as MT-SP1 or MTSP1). In some examples, the CM may comprise a substrate of a matrix metalloprotease (MMP). In some examples, the CM may comprise a substrate of cysteine protease (CP) (e.g., legumain).

[0220] In some embodiments, the CM may comprise a substrate for a disintegrin and metalloproteinase (ADAM) or disintegrin and metalloproteinase with thrombospondin motifs (ADAMTS) (e.g., ADAM8, ADAM9, ADAM10, ADAM12, ADAM15, ADAM17/TACE, ADEMDEC1, ADAMTS1, ADAMTS4, ADAMTS5), aspartate protease (e.g. BACE, Renin), aspartic cathepsin (e.g., Cathepsin D, Cathepsin E), Caspase (e.g., Caspase 1, Caspase 2, Caspase 3, Caspase 4, Caspase 5, Caspase 6, Caspase 7, Caspase 8, Caspase 9, Caspase 10, Caspase 14), cysteine cathepsin (e.g., Cathepsin A, Cathepsin B, Cathepsin C, Cathepsin G, Cathepsin K, Cathepsin L, Cathepsin S, Cathepsin V/L2, Cathepsin X/Z/P), cysteine proteinase (e.g., Cruzipain, Legumain, Otubain-2), Chymase, DESCI, DPP-4, FAP, Elastase, FVIIa, FIXA, FXa, FXIa, FXIIa, Granzyme B, Guanidinobenzoatase, Hepsin, HtrAl, Human Neutrophil Elastase, KLK (e.g., KLK4, KLK5, KLK6, KLK7, KLK8, KLK10, KLK11, KLK13, KLK14), metallo proteinase (e g., Meprin, Neprilysin, PSMA, BMP-1), Lactoferrin, Marapsin, Matriptase-2, MT-SPl/Matriptase, NS3/4A, PACE4, Plasmin, PSA, a MMP (e.g., MMP1, MMP2, MMP3, MMP7, MMP8, MMP9, MMP10, MMP11, MMP12, MMP13, MMP14, MMP15, MMP16, MMP17, MMP19, MMP20, MMP23, MMP24, MMP26, MMP27), TMPRSS2, TMPRSS3, TMPRSS4, tPA, Thrombin, Tryptase, and uPA. In some embodiments, the protease substrate in the CM may comprise a peptide sequence that is not substantially identical (e.g., no more than 90%, 80%, 70%, 60%, or 50% identical) to any polypeptide sequence that is naturally cleaved by the same protease.

[0221] Examples of CMs include those described in WO 2010/081173, WO2021207669, WO2021207657, WO2021142029, WO2021061867, WO2020252349, WO2020252358, WO2020236679, WO2020176672, WO2020118109, WO2020092881, WO2020086665, WO2019213444, WO2019183218, WO2019173771, WO2019165143, WO2019075405, WO2019046652, WO2019018828, WO2019014586, WO2018222949, WO2018165619, WO2018085555, WO2017011580, WO2016179335, WO2016179285, WO2016179257, WO2016149201, WO2016014974, which are incorporated herein by reference in their entireties for all purposes.

[0222] In some embodiments, the CM may be or comprise a combination, a C-terminal truncation variant, or an N-terminal truncation variant of the example sequences discussed above. Truncation variants of the aforementioned amino acid sequences that are suitable for use in a CM may be any that retain the recognition site for the corresponding protease. These include C-terminal and/or N-terminal truncation variants comprising at least 3 contiguous amino acids of the above-described amino acid sequences, or at least 4, 5, 6, 7, 8, 9, or 10 amino acids of the foregoing amino acid sequences that retain a recognition site for a protease. In certain embodiments, the truncation variant of the above-described amino acid sequences may be an amino acid sequence corresponding to any of the above, but that is C- and/or N-terminally truncated by 1 to 10 amino acids, 1 to 9 amino acids, 1 to 8 amino acids, 1 to 7 amino acids, 1 to 6 amino acids, 1 to 5 amino acids, 1 to 4 amino acids, or 1 to 3 amino acids, and which: (1) has at least three amino acid residues; and (2) retains a recognition site for a protease. In some of the foregoing embodiments, the truncated CM is an N-terminally truncated CM. In some embodiments, the truncated CM is a C-terminally truncated CM. In some embodiments, the truncated C is a C- and an N-terminally truncated CM. In some embodiments, the CM may comprise a total of 3 amino acids to 25 amino acids. In some embodiments, the CM may comprise a total of 3 to 25, 3 to 20, 3 to 15, 3 to 10, 3 to 5, 5 to 25, 5 to 20, 5 to 15, 5 to 10, 10 to 25, 10 to 20, 10 to 15, 15 to 25, 15 to 20, or 20 to 25 amino acids.

[0223] In some embodiments, the CM may be specifically cleaved by at least a protease at a rate of about 0.001-1500×10⁴ M\hat{ }S′¹ or at least 0.001, 0.005, 0.01, 0.05, 0.1, 0.5, I, 2.5, 5, 7.5, 10, 15, 20, 25, 50, 75, 100, 125, 150, 200, 250, 500, 750, 1000, 1250, or 1500×10⁴ M\hat{ }S′¹. The rate may be measured as substrate cleavage kinetics (k_{c}at/Kₘ) as disclosed in WO2016118629. Conjugation agents

[0224] In some aspects, the target binding proteins (including the activatable target binding proteins) may further comprise one or more additional agents, e.g., a targeting moiety to facilitate delivery to a cell or tissue of interest, a therapeutic agent (e.g., an antineoplastic agent such as chemotherapeutic or anti-neoplastic agent), a toxin, a radioisotope, a small molecule, a diagnostic agent, a targeting moiety, or a detectable moiety, or a fragment thereof. The additional agents may be conjugated to the target binding proteins. The term “agent” is used herein to denote a chemical compound, a mixture of chemical compounds, a biological macromolecule, or an extract made from biological materials.

### Pharmaceutical Compositions and Administration

[0225] To prepare pharmaceutical or sterile compositions of the target binding proteins (e.g., anti-hLY6G6D antibodies and antigen-binding fragments) of the invention, the antibody or antigen-binding fragment thereof is admixed with a pharmaceutically acceptable carrier or excipient. See, e.g., Remington's Pharmaceutical Sciences and U.S. Pharmacopeia: National Formulary, Mack Publishing Company, Easton, PA (1984).

[0226] Formulations of therapeutic agents may be prepared by mixing with acceptable carriers, excipients, or stabilizers in the form of, e.g., lyophilized powders, slurries, aqueous solutions or suspensions (see, e.g., Hardman, et al. (2001) Goodman and Gilman's The Pharmacological Basis of Therapeutics, McGraw-Hill, New York, NY; Gennaro (2000) Remington: The Science and Practice of Pharmacy, Lippincott, Williams, and Wilkins, New York, NY; Avis, et al. (eds.) (1993) Pharmaceutical Dosage Forms: Parenteral Medications, Marcel Dekker, NY; Lieberman, et al. (eds.) (1990) Pharmaceutical Dosage Forms: Tablets, Marcel Dekker, NY; Lieberman, et al. (eds.) (1990) Pharmaceutical Dosage Forms: Disperse Systems, Marcel Dekker, NY; Weiner and Kotkoskie (2000) Excipient Toxicity and Safety, Marcel Dekker, Inc., New York, NY).

[0227] Toxicity and therapeutic efficacy of the target binding proteins of the invention, administered alone or in combination with another therapeutic agent, can be determined by standard pharmaceutical procedures in cell cultures or experimental animals, e.g., for determining the LD₅₀ (the dose lethal to 50% of the population) and the ED₅₀ (the dose therapeutically effective in 50% of the population). The dose ratio between toxic and therapeutic effects is the therapeutic index (LD₅₀/ED₅₀). The data obtained from these cell culture assays and animal studies can be used in formulating a range of dosage for use in human. The dosage of such compounds lies preferably within a range of circulating concentrations that include the ED₅₀ with little or no toxicity. The dosage may vary within this range depending upon the dosage form employed and the route of administration.

[0228] Suitable routes of administration include parenteral administration, such as intramuscular, intravenous, or subcutaneous administration and oral administration. Administration of target binding proteins, used in the pharmaceutical composition or to practice the method of the present invention can be carried out in a variety of conventional ways, such as oral ingestion, inhalation, topical application or cutaneous, subcutaneous, intraperitoneal, parenteral, intraarterial or intravenous injection. In one embodiment, the target binding protein of the invention is administered intravenously. In another embodiment, the target binding proteins of the invention is administered subcutaneously.

[0229] Alternatively, one may administer the target binding proteins in a local rather than systemic manner, for example, via injection of the antibody directly into the site of action, often in a depot or sustained release formulation. Furthermore, one may administer the antibody in a targeted drug delivery system.

[0230] In a further embodiment, a further therapeutic agent that is administered to a subject in association with the target binding proteins of the invention in accordance with the Physicians' Desk Reference 2003 (Thomson Healthcare; 57th edition (Nov. 1, 2002)). Methods for co-administration or treatment with a second therapeutic agent are well known in the art, see, e.g., Hardman, et al. (eds.), 2001, Goodman and Gilman's The Pharmacological Basis of Therapeutics, 10th ed., McGraw-Hill, New York, NY; Poole and Peterson (eds.), 2001, Pharmacotherapeutics for Advanced Practice: A Practical Approach, Lippincott, Williams & Wilkins, Phila., PA; Chabner and Longo (eds.), 2001, Cancer Chemotherapy and Biotherapy, Lippincott, Williams & Wilkins, Phila., PA. The other agents include, but are not limited to, a cytotoxic, chemotherapeutic, cytostatic, anti-angiogenic or antimetabolite agents, a tumor targeted agent, an immune stimulating or immune modulating agent or an antibody conjugated to a cytotoxic, cytostatic, or otherwise toxic agent. The pharmaceutical composition can also be employed with other therapeutic modalities such as surgery, chemotherapy and radiation.

[0231] In particular embodiments, an anti-hLY6G6D antibody or antigen-binding fragment thereof of the invention can be administered by an invasive route such as by injection. In further embodiments of the invention, an anti-hLY6G6D antibody or antigen-binding fragment thereof, or pharmaceutical composition thereof, is administered intravenously, subcutaneously, intramuscularly, intraarterially, intratumorally, or by inhalation, aerosol delivery. Administration by non-invasive routes (e.g., orally; for example, in a pill, capsule or tablet) is also within the scope of the present invention.

[0232] The present invention provides a vessel (e.g., a plastic or glass vial, e.g., with a cap or a chromatography column, hollow bore needle or a syringe cylinder) comprising any of the target binding proteins of the invention or a pharmaceutical composition thereof. The present invention also provides an injection device comprising any of the target binding proteins of the invention or a pharmaceutical composition thereof. An injection device is a device that introduces a substance into the body of a patient via a parenteral route, e.g., intramuscular, subcutaneous or intravenous. For example, an injection device may be a syringe (e.g., pre-filled with the pharmaceutical composition, such as an auto-injector) which, for example, includes a cylinder or barrel for holding fluid to be injected (e.g., antibody or fragment or a pharmaceutical composition thereof), a needle for piecing skin and/or blood vessels for injection of the fluid; and a plunger for pushing the fluid out of the cylinder and through the needle bore. In an embodiment of the invention, an injection device that comprises an antibody or antigen-binding fragment thereof of the present invention or a pharmaceutical composition thereof is an intravenous (IV) injection device. Such a device includes the antibody or fragment or a pharmaceutical composition thereof in a cannula or trocar/needle which may be attached to a tube which may be attached to a bag or reservoir for holding fluid (e.g., saline; or lactated ringer solution comprising NaCl, sodium lactate, KCl, CaCl₂) and optionally including glucose) introduced into the body of the patient through the cannula or trocar/needle. The antibody or fragment or a pharmaceutical composition thereof may, in an embodiment of the invention, be introduced into the device once the trocar and cannula are inserted into the vein of a subject and the trocar is removed from the inserted cannula. The IV device may, for example, be inserted into a peripheral vein (e.g., in the hand or arm); the superior vena cava or inferior vena cava, or within the right atrium of the heart (e.g., a central IV); or into a subclavian, internal jugular, or a femoral vein and, for example, advanced toward the heart until it reaches the superior vena cava or right atrium (e.g., a central venous line). In an embodiment of the invention, an injection device is an autoinjector; a jet injector or an external infusion pump. A jet injector uses a high-pressure narrow jet of liquid which penetrate the epidermis to introduce the antibody or fragment or a pharmaceutical composition thereof to a patient's body. External infusion pumps are medical devices that deliver the antibody or fragment or a pharmaceutical composition thereof into a patient's body in controlled amounts. External infusion pumps may be powered electrically or mechanically. Different pumps operate in different ways, for example, a syringe pump holds fluid in the reservoir of a syringe, and a moveable piston controls fluid delivery, an elastomeric pump holds fluid in a stretchable balloon reservoir, and pressure from the elastic walls of the balloon drives fluid delivery. In a peristaltic pump, a set of rollers pinches down on a length of flexible tubing, pushing fluid forward. In a multi-channel pump, fluids can be delivered from multiple reservoirs at multiple rates.

[0233] The pharmaceutical compositions disclosed herein may also be administered with a needleless hypodermic injection device; such as the devices disclosed in U.S. Pat. Nos. 6,620,135; 6,096,002; 5,399,163; 5,383,851; 5,312,335; 5,064,413; 4,941,880; 4,790,824 or 4,596,556. Such needleless devices comprising the pharmaceutical composition are also part of the present invention. The pharmaceutical compositions disclosed herein may also be administered by infusion. Examples of well-known implants and modules for administering the pharmaceutical compositions include those disclosed in: U.S. Pat. No. 4,487,603, which discloses an implantable micro-infusion pump for dispensing medication at a controlled rate; U.S. Pat. No. 4,447,233, which discloses a medication infusion pump for delivering medication at a precise infusion rate; U.S. Pat. No. 4,447,224, which discloses a variable flow implantable infusion apparatus for continuous drug delivery; U.S. Pat. No. 4,439,196, which discloses an osmotic drug delivery system having multi-chamber compartments. Many other such implants, delivery systems, and modules are well known to those skilled in the art and those comprising the pharmaceutical compositions of the present invention are within the scope of the present invention.

[0234] Alternately, one may administer the target binding proteins of the invention in a local rather than systemic manner, for example, via injection of the antibody or fragment directly into a tumor. Furthermore, one may administer the antibody or fragment in a targeted drug delivery system, for example, in a liposome coated with a tissue-specific antibody, targeting, for example, a tumor. The liposomes will be targeted to and taken up selectively by the afflicted tissue. Such methods and liposomes are part of the present invention.

[0235] The administration regimen depends on several factors, including the serum or tissue turnover rate of the target binding proteins (anti-hLY6G6D antibody or antigen-binding fragment), the level of symptoms, the immunogenicity of the target binding proteins, and the accessibility of the target cells in the biological matrix. Preferably, the administration regimen delivers sufficient therapeutic antibody or fragment to effect improvement in the target disease state, while simultaneously minimizing undesired side effects. Accordingly, the amount of biologic delivered depends in part on the particular therapeutic antibody and the severity of the condition being treated. Guidance in selecting appropriate doses of therapeutic antibodies or fragments is available (see, e.g., Wawrzynczak (1996) Antibody Therapy, Bios Scientific Pub. Ltd, Oxfordshire, UK; Kresina (ed.) (1991) Monoclonal Antibodies, Cytokines and Arthritis, Marcel Dekker, New York, NY; Bach (ed.) (1993) Monoclonal Antibodies and Peptide Therapy in Autoimmune Diseases, Marcel Dekker, New York, NY; Baert, et al. (2003) New Engl. J. Med. 348:601-608; Milgrom et al. (1999) New Engl. J. Med. 341:1966-1973; Slamon et al. (2001) New Engl. J. Med. 344:783-792; Beniaminovitz et al. (2000) New Engl. J. Med. 342:613-619; Ghosh et al. (2003) New Engl. J. Med. 348:24-32; Lipsky et al. (2000) New Engl. J. Med. 343:1594-1602).

[0236] Determination of the appropriate dose is made by the clinician, e.g., using parameters or factors known or suspected in the art to affect treatment. Generally, the dose begins with an amount somewhat less than the optimum dose and it is increased by small increments thereafter until the desired or optimum effect is achieved relative to any negative side effects. Important diagnostic measures include those of symptoms of, e.g., the inflammation or level of inflammatory cytokines produced. In general, it is desirable that a biologic that will be used is derived from the same species as the animal targeted for treatment, thereby minimizing any immune response to the reagent. In the case of human subjects, for example, humanized and fully human antibodies may be desirable.

[0237] The target binding proteins disclosed herein may be provided by continuous infusion, or by doses administered, e.g., daily, 1-7 times per week, weekly, bi-weekly, monthly, bimonthly, quarterly, semiannually, annually etc. Doses may be provided, e.g., intravenously, subcutaneously, topically, orally, nasally, rectally, intramuscular, intracerebrally, intraspinally, or by inhalation. A total weekly dose is generally at least 0.05 μg/kg body weight, more generally at least 0.2 μg/kg, 0.5 μg/kg, 1 μg/kg, 10 μg/kg, 100 μg/kg, 0.25 mg/kg, 1.0 mg/kg, 2.0 mg/kg, 5.0 mg/mL, 10 mg/kg, 25 mg/kg, 50 mg/kg or more (see, e.g., Yang, et al. (2003) New Engl. J. Med. 349:427-434; Herold, et al. (2002) New Engl. J. Med. 346:1692-1698; Liu, et al. (1999) J. Neurol. Neurosurg. Psych. 67:451-456; Portielji, et al. (20003) Cancer Immunol. Immunother. 52:151-144). Doses may also be provided to achieve a pre-determined target concentration of target binding proteins in the subject's serum, such as 0.1, 0.3, 1, 3, 10, 30, 100, 300 μg/mL or more. In other embodiments, a target binding protein of the present invention is administered, e.g., subcutaneously or intravenously, on a weekly, biweekly, “every 4 weeks,” monthly, bimonthly, or quarterly basis at 10, 20, 50, 80, 100, 200, 500, 1000 or 2500 mg/subject.

[0238] The target binding proteins can be administered over a period of at least about 1 week, 2 weeks, 1 month (4 weeks), 6 weeks, 2 months, 3 months, 6 months, 1 year, 2 years, 3 years or longer, or as deemed appropriate by the treating physician. A chronic condition can exist for, e.g., at least about 6 weeks, 2 months, a year, or longer. The target binding proteins can be administered over a period of at least about 6 weeks, 2 months, 3 months or 6 months, a year, or even multiple years as required for medical care of an individual.

[0239] The target binding proteins can also be administered in an irregular manner. Early achievement of an effective target antibody concentration (a therapeutic dose level) with a loading dose followed by maintenance dosing with the antibody (frontloading) may be more effective than conventional therapy in terms of requiring a lower total antibody dose and faster time to maximum target engagement. As used herein, such an administration protocol is referred to as a “loading/maintenance administration protocol.” An effective target antibody concentration may be reached in 4 weeks or less, preferably 3 weeks or less, more preferably 2 weeks or less, most preferably 1 week or less, including 1 day or less using a loading dose. The target serum concentration is then maintained by administration of an equal or smaller (or less frequent) maintenance dose during the remainder of the treatment regimen or until suppression of disease symptoms is achieved.

[0240] The term “frontloading” when referring to drug administration refers to the initial loading dose, followed by the maintenance dose. The initial loading dose (single or multiple) is intended to more quickly increase the serum drug concentration of an animal or human patient to an effective target serum concentration. In various embodiments, frontloading is accomplished by initial dosing delivered over 3 weeks or less so that the antibody reaches the target serum concentration. Preferably, the loading dose or series of doses is administered for 2 weeks or less, more preferably 1 week or less, e.g. 1 day or less. Most preferably, the loading dosing is a single dosing, with no maintenance dosing thereafter for at least one week, and the loading dosing is administered in 1 day or less. In order to avoid adverse immune reactions to antibody drugs, it may be preferred to deliver the loading dose of antibody is administered by intravenous injection. The present invention includes loading and maintenance doses of frontloading drug delivery by intravenous or subcutaneous administration.

[0241] Administration of the loading dose can be, for example, one or more dosings at a time interval of at least about 1, 2, 3, 4, 5, 6, 7 or 8 weeks apart. In some embodiments, the at least one loading dose is administered by one or more intravenous injections and then at least one maintenance dose by one or more intravenous or subcutaneous administrations. In other embodiments, the instructions can be for administering at least one loading dose by, for example, one or more intravenous or subcutaneous administrations and at least one maintenance dose by one or more intravenous or subcutaneous administrations. In certain embodiments, both the at least one loading dose as well as the at least one maintenance dose is administered subcutaneously. In other embodiments, the at least one loading dose is administered by intravenous infusion followed by at least one maintenance dose administered subcutaneously. For example, the method of treatment can comprise administering a loading dose of 150-1350 mg of the anti-hLY6G6D antibody by intravenous infusion or subcutaneous injection. After the loading dose (e.g. 1 week, 2 weeks, 3 weeks or 4 weeks after the loading dose), a maintenance dose of 600 mg or less of the anti-hLY6G6D antibody can be administered every 4 weeks or less, preferably every 3 weeks or less, more preferably every 2 weeks or less, and in embodiments every 1 week or less, by subcutaneous injection. The choice of loading and maintenance dosages and intervals can be made according to the ability of the animal or human patient to tolerate administration of the antibody to the body and according to a desired serum level of therapeutic to achieve.

[0242] A loading dose of a drug can be larger (e.g., about 1.5, 2, 3, 4 or 5 times larger) than a subsequent maintenance dose. The one or more therapeutically effective maintenance doses can be any therapeutically effective amount described herein. The loading dose can be about 2 or 3 times larger than the maintenance dose. The anti-hLY6G6D antibody can be administered in two (or more) loading doses prior to the maintenance dose. A first loading dose of the antibody or fragment thereof can be administered on day 1, a second loading dose can be administered, e.g., about 1 or 2 weeks later, and a maintenance dose can be administered, e.g., once weekly or once every 2 weeks thereafter for the duration of treatment. The first loading dose can be about 3 or 4 times larger than the maintenance dose, and the second loading dose can be about 2, 3, 4, 5, or more times larger than the maintenance dose.

[0243] As used herein, “inhibit” or “treat” or “treatment” includes a postponement of development of the symptoms associated with disease and/or a reduction in the severity of such symptoms that will or are expected to develop with said disease. The terms further include ameliorating existing symptoms, preventing additional symptoms, and ameliorating or preventing the underlying causes of such symptoms. Thus, the terms denote that a beneficial result has been conferred on a vertebrate subject with a disease.

[0244] As used herein, the term “effective amount” refers to an amount of a target binding proteins f of the invention that, when administered alone or in combination with an additional therapeutic agent to a cell, tissue, or subject, is effective to cause a measurable improvement in one or more symptoms of disease, for example cancer or the progression of cancer. An effective dose further refers to that amount of the antibody or fragment sufficient to result in at least partial amelioration of symptoms, e.g., tumor shrinkage or elimination, lack of tumor growth, increased survival time. When applied to an individual active ingredient administered alone, an effective dose refers to that ingredient alone. When applied to a combination, an effective dose refers to combined amounts of the active ingredients that result in the therapeutic effect, whether administered in combination, serially or simultaneously. An effective amount of a therapeutic will result in an improvement of a diagnostic measure or parameter by at least 10%; usually by at least 20%; preferably at least about 30%; more preferably at least 40%, and most preferably by at least 50%. An effective amount can also result in an improvement in a subjective measure in cases where subjective measures are used to assess disease severity.

### Kits

[0245] Further provided are kits comprising one or more components that include, but are not limited to, a target binding protein as described herein in association with one or more additional components including, but not limited to a pharmaceutically acceptable carrier and/or a therapeutic agent, as discussed herein. The antibody or fragment and/or the therapeutic agent can be formulated as a pure composition or in combination with a pharmaceutically acceptable carrier, in a pharmaceutical composition.

[0246] In one embodiment, the kit includes an anti-hLY6G6D antibody or antigen-binding fragment thereof of the invention or a pharmaceutical composition thereof in one container (e.g., in a sterile glass or plastic vial) and/or a therapeutic agent and a pharmaceutical composition thereof in another container (e.g., in a sterile glass or plastic vial).

[0247] In another embodiment, the kit comprises a combination of the invention, including an anti-hLY6G6D antibody or antigen-binding fragment thereof of the invention along with a pharmaceutically acceptable carrier, optionally in combination with one or more therapeutic agents formulated together, optionally, in a pharmaceutical composition, in a single, common container.

[0248] If the kit includes a pharmaceutical composition for parenteral administration to a subject, the kit can include a device for performing such administration. For example, the kit can include one or more hypodermic needles or other injection devices as discussed above.

[0249] The kit can include a package insert including information concerning the pharmaceutical compositions and dosage forms in the kit. Generally, such information aids patients and physicians in using the enclosed pharmaceutical compositions and dosage forms effectively and safely. For example, the following information regarding a combination of the invention may be supplied in the insert: pharmacokinetics, pharmacodynamics, clinical studies, efficacy parameters, indications and usage, contraindications, warnings, precautions, adverse reactions, overdosage, proper dosage and administration, how supplied, proper storage conditions, references, manufacturer/distributor information and patent information.

### Preferred Embodiments of the Invention

[0250] Embodiment 1: An antibody or antigen binding fragment thereof that binds to human LY6G6D, wherein the antibody or antigen binding fragment comprises heavy chain CDRs H1, H2, and H3 and light chain CDRs L1, L2, and L3 amino acid sequences as recited for one of the Identifiers in Table 1.

[0251] Embodiment 2: The antibody or antigen binding fragment of embodiment 1, wherein the antigen or binding fragment comprises a heavy chain variable region and a light chain variable region comprising amino acid sequences as recited for one of the Identifiers in Table 2; or a heavy chain variable region and a light chain variable region having at least 90% sequence identity, at least 95% sequence identity, at least 97% sequence identity, at least 98% sequence identity, or at least 99% sequence identity with a heavy chain variable region and a light chain variable region comprising amino acid sequences as recited for one of the Identifiers in Table 2.

[0252] Embodiment 3: The antibody or antigen binding fragment of embodiment 1 or 2, wherein the antibody or fragment thereof is an scFv.

[0253] Embodiment 4: The antibody or antigen binding fragment of one of embodiments 1 or 2, wherein the antibody or antigen binding fragment is provided as an intact IgG antibody.

[0254] Embodiment 5: The antibody or antigen binding fragment of embodiment 4, wherein the IgG antibody comprises a wild-type or mutated IgG2 Fc region.

[0255] Embodiment 6: The antibody or antigen binding fragment of embodiment 4, wherein the IgG antibody comprises an IgG1 Fc region.

[0256] Embodiment 7: The antibody or antigen binding fragment of embodiment 4, wherein the IgG1 Fc region comprises one or mutations that reduce effector functions of the IgG antibody relative to a wild-type IgG1 Fc region.

[0257] Embodiment 8: The antibody or antigen binding fragment of embodiment 4, wherein the IgG antibody comprises an IgG4 Fc region.

[0258] Embodiment 9: The antibody or antigen binding fragment of any of embodiments 1-10, wherein the antibody or antigen binding fragment is human or is humanized.

[0259] Embodiment 10: The antibody or antigen binding fragment of any one of embodiments 1-9 that comprises a glycosylation pattern characteristic of expression by a mammalian cell.

[0260] Embodiment 11: The antibody or antigen binding fragment of any one of embodiments 1-9 that comprises a glycosylation pattern characteristic of expression by a CHO cell.

[0261] Embodiment 12: The antibody or antigen binding fragment of any one of embodiments 1-11, wherein the antibody or antigen binding fragment is provided as a bispecific T cell engaging antibody (BiTE), a (SCFV)2, a NANOBODY®, a nanobody-HSA VHH-scAb, a VHH-Fab, a Dual scFab, a F(ab′)2, a diabody, a CROSSMAB®, a DAF (two-in-one), a DAE (four-in-one), a DUTAMAB®, a DT-TgG, a knobs-in-holes common light chain, a knobs-in-holes assembly, a charge pair, a Fab-arm exchange, a SEEDbody, a LUZ-Y, a FcAb, a kl-body, an orthogonal Fab, a DVD-IgG, a IgG (H)-scFv, a scFv-(H) IgG, IgG (L)-scFv, scFv-(L) IgG, IgG (L,H)-Fv, IgG (H)-V, V(H)-IgG, IgG (L)-V, V(L)-IgG, KIH IgG-scFab, 2scFv-IgG, IgG-2scFv, scFv4-Ig, ZYBODY™, DVI-IgG, Diabody-CH3, a triple body, a miniantibody, a minibody, a TriBi minibody, scFv-CH3 KIH, Fab-scFv, a F(ab′)2-scFv2, a scFv-KIH, a Fab-scFv-Fc, a tetravalent HCAb, a scDiabody-Fc, a Diabody-Fc, a tandem scFv-Fc, a VHH-Fc, a tandem VHH-Fc, a LTIH-Fc KiH, a Fab-VHH-Fc, an Intrabody, a dock and lock, an ImmTAC® (immune-mobilizing monoclonal TCRs (T cell receptors) against cancer), an IgG-IgG conjugate, a Cov-X-Body, a scFv1-PEG-scFv2, an Adnectin, a DARPin, or a fibronectin, an IgG, an IgM, an IgA, an IgE, an IgD, or a DEP conjugate, TMEAbody™, SAFEbody®, TRITAC®, a dual affinity retargeting (DART®) bispecific antibody, a simultaneous multiple interaction T-cell engagers (SMITE), or a SHIELD.

[0262] Embodiment 13: The antibody or antigen binding fragment of any one of embodiments 1-12, wherein the antibody or antigen binding fragment thereof comprises an immunoglobulin binding motif that binds to an antigen selected from the group consisting CD16, γδ TCR, CTLA-4, PD-1, PD-L1, 4-1BB, IL-13, IL-4, VEGF, and CD3.

[0263] Embodiment 14: The antibody according to any one of embodiments 1-13, wherein the antibody comprises heavy chain CDRs H1, H2, and H3 and light chain CDRs L1, L2, and L3 amino acid sequences as recited for an Identifier in Table 1 selected from the group consisting of:
[0264] CB21-498, CB21-498-001, CB21-498-002, CB21-498-003, CB21-498-004, CB21-498-005, CB21-498-006, CB21-498-007, CB21-498-008, CB21-498-009, CB21-498-010, CB21-498-011, CB21-498-012, CB21-498-013, CB21-498-014, CB21-498-015, CB21-498-016, CB21-498-017, CB21-498-018, CB21-498-019, CB21-498-020, CB21-498-021, CB21-498-022, CB21-498-023, CB21-498-024, CB21-498-025, CB21-498-026, CB21-498-027, CB21-498-028, CB21-498-029, CB21-498-030, CB21-498-031, CB21-498-032, CB21-498-033, CB21-498-034, CB21-498-035, CB21-498-036, CB21-498-037, CB21-498-038, CB21-498-039, CB21-498-040, CB21-498-041, CB21-498-042, CB21-498-043, CB21-498-044, CB21-498-045, CB21-498-046, CB21-498-047, CB21-498-048, CB21-498-049, CB21-498-050, CB21-498-051, CB21-498-052, CB21-498-053, CB21-498-054, CB21-498-055, CB21-498-056, CB21-498-057, CB21-498-058, CB21-498-059, CB21-498-060, CB21-498-061, CB21-498-062, CB21-498-063, CB21-498-064, CB21-498-065, CB21-498-066, CB21-498-067, CB21-498-068, CB21-498-069, CB21-498-070, CB21-498-071, CB21-498-072, CB21-498-073, CB21-498-074, CB21-498-075, CB21-498-076, CB21-498-077, CB21-498-078, CB21-498-079, CB21-498-080, CB21-498-081, CB21-498-082, CB21-498-083, CB21-498-084, CB21-498-085, CB21-498-086, CB21-498-087, CB21-498-088, CB21-498-089, CB21-498-090, CB21-498-091, CB21-498-092, CB21-498-093, CB21-498-094, CB21-498-095, CB21-498-096, CB21-498-097, CB21-498-098, CB21-498-099, CB21-498-100, CB21-498-101, CB21-498-102, CB21-498-103, CB21-498-104, CB21-498-105, CB21-498-106, CB21-498-107, CB21-498-108, CB21-498-109, CB21-498-110, CB21-498-111, CB21-498-112, CB21-498-113, CB21-498-114, CB21-498-115, CB21-498-116, CB21-498-117, CB21-498-118, CB21-498-119, CB21-498-120, CB21-498-121, CB21-498-122, CB21-498-123, CB21-498-124, CB21-498-125, CB21-498-126, CB21-498-127, CB21-498-128, CB21-498-129, CB21-498-130, CB21-498-131, CB21-498-132, CB21-498-133, CB21-498-134, CB21-498-135, CB21-498-136, CB21-498-137, CB21-498-138, CB21-498-139, CB21-498-140, CB21-498-141, CB21-498-142, CB21-498-143, CB21-499, CB21-499-001, CB21-499-002, CB21-499-003, CB21-499-004, CB21-499-005, CB21-499-006, CB21-499-007, CB21-499-008, CB21-499-009, CB21-499-010, CB21-499-011, CB21-499-012, CB21-499-013, CB21-499-014, CB21-499-015, CB21-499-016, CB21-499-017, CB21-499-018, CB21-499-019, CB21-499-020, CB21-499-021, CB21-499-022, CB21-499-023, CB21-499-024, CB21-499-025, CB21-499-026, CB21-499-027, CB21-499-028, CB21-499-029, CB21-499-030, CB21-499-031, CB21-499-032, CB21-499-033, CB21-499-034, CB21-499-035, CB21-499-036, CB21-499-037, CB21-499-038, CB21-499-039, CB21-499-040, CB21-499-041, CB21-499-042, CB21-499-043, CB21-499-044, CB21-499-045, CB21-499-046, CB21-499-047, CB21-499-048, CB21-499-049, CB21-499-050, CB21-499-051, CB21-499-052, CB21-499-053, CB21-499-054, CB21-499-055, CB21-499-056, CB21-499-057, CB21-499-058, CB21-499-059, CB21-499-060, CB21-499-061, CB21-499-062, CB21-499-063, CB21-499-064, CB21-499-065, CB21-499-066, CB21-499-067, CB21-499-068, CB21-499-069, CB21-499-070, CB21-499-071, CB21-499-072, CB21-499-073, CB21-499-074, CB21-499-075, CB21-499-076, CB21-499-077, CB21-499-078, CB21-499-079, CB21-499-080, CB21-499-081, CB21-499-082, CB21-499-083, CB21-499-084, CB21-499-085, CB21-499-086, CB21-499-087, CB21-499-088, CB21-499-089, CB21-499-090, CB21-499-091, CB21-499-092, CB21-499-093, CB21-499-094, CB21-499-095, CB21-499-096, CB21-499-097, CB21-499-098, CB21-499-099, CB21-499-100, CB21-499-101, CB21-499-102, CB21-499-103, CB21-499-104, CB21-499-105, CB21-499-106, CB21-499-107, CB21-499-108, CB21-499-109, CB21-499-110, CB21-499-111, CB21-499-112, CB21-499-113, CB21-499-114, CB21-499-115, CB21-499-116, CB21-499-117, CB21-499-118, CB21-499-119, CB21-499-120, CB21-499-121, CB21-499-122, CB21-499-123, CB21-499-124, CB21-499-125, CB21-499-126, CB21-499-127, CB21-499-128, CB21-499-129, CB21-499-130, CB21-499-131, CB21-499-132, CB21-499-133, CB21-499-134, CB21-499-135, CB21-499-136, CB21-499-137, CB21-499-138, CB21-499-139, CB21-499-140, CB21-499-141, CB21-499-142, CB21-499-143, CB21-499-144, CB21-499-145, CB21-499-146, CB21-499-147, CB21-499-148, CB21-499-149, CB21-499-150, CB21-499-151, CB21-499-152, CB21-499-153, CB21-499-154, CB21-499-155, CB21-499-156, CB21-499-157, CB21-499-158, CB21-499-159, CB21-499-160, CB21-499-161, CB21-499-162, CB21-499-163, CB21-499-164, CB21-499-165, CB21-499-166, CB21-499-167, CB21-499-168, CB21-499-169, CB21-499-170, CB21-499-171, CB21-499-172, CB21-499-174, CB21-499-175, CB21-499-176, CB21-499-177, CB21-499-178, and CB21-499-179.

[0265] Embodiment 15: The antibody according to any one of embodiments 1-13, wherein the antigen or binding fragment comprises a heavy chain variable region and a light chain variable region comprising amino acid sequences as recited for an Identifier in Table 2 selected from the group consisting of: CB21-498, CB21-498-001, CB21-498-002, CB21-498-003, CB21-498-004, CB21-498-005, CB21-498-006, CB21-498-007, CB21-498-008, CB21-498-009, CB21-498-010, CB21-498-011, CB21-498-012, CB21-498-013, CB21-498-014, CB21-498-015, CB21-498-016, CB21-498-017, CB21-498-018, CB21-498-019, CB21-498-020, CB21-498-021, CB21-498-022, CB21-498-023, CB21-498-024, CB21-498-025, CB21-498-026, CB21-498-027, CB21-498-028, CB21-498-029, CB21-498-030, CB21-498-031, CB21-498-032, CB21-498-033, CB21-498-034, CB21-498-035, CB21-498-036, CB21-498-037, CB21-498-038, CB21-498-039, CB21-498-040, CB21-498-041, CB21-498-042, CB21-498-043, CB21-498-044, CB21-498-045, CB21-498-046, CB21-498-047, CB21-498-048, CB21-498-049, CB21-498-050, CB21-498-051, CB21-498-052, CB21-498-053, CB21-498-054, CB21-498-055, CB21-498-056, CB21-498-057, CB21-498-058, CB21-498-059, CB21-498-060, CB21-498-061, CB21-498-062, CB21-498-063, CB21-498-064, CB21-498-065, CB21-498-066, CB21-498-067, CB21-498-068, CB21-498-069, CB21-498-070, CB21-498-071, CB21-498-072, CB21-498-073, CB21-498-074, CB21-498-075, CB21-498-076, CB21-498-077, CB21-498-078, CB21-498-079, CB21-498-080, CB21-498-081, CB21-498-082, CB21-498-083, CB21-498-084, CB21-498-085, CB21-498-086, CB21-498-087, CB21-498-088, CB21-498-089, CB21-498-090, CB21-498-091, CB21-498-092, CB21-498-093, CB21-498-094, CB21-498-095, CB21-498-096, CB21-498-097, CB21-498-098, CB21-498-099, CB21-498-100, CB21-498-101, CB21-498-102, CB21-498-103, CB21-498-104, CB21-498-105, CB21-498-106, CB21-498-107, CB21-498-108, CB21-498-109, CB21-498-110, CB21-498-111, CB21-498-112, CB21-498-113, CB21-498-114, CB21-498-115, CB21-498-116, CB21-498-117, CB21-498-118, CB21-498-119, CB21-498-120, CB21-498-121, CB21-498-122, CB21-498-123, CB21-498-124, CB21-498-125, CB21-498-126, CB21-498-127, CB21-498-128, CB21-498-129, CB21-498-130, CB21-498-131, CB21-498-132, CB21-498-133, CB21-498-134, CB21-498-135, CB21-498-136, CB21-498-137, CB21-498-138, CB21-498-139, CB21-498-140, CB21-498-141, CB21-498-142, CB21-498-143, CB21-499, CB21-499-001, CB21-499-002, CB21-499-003, CB21-499-004, CB21-499-005, CB21-499-006, CB21-499-007, CB21-499-008, CB21-499-009, CB21-499-010, CB21-499-011, CB21-499-012, CB21-499-013, CB21-499-014, CB21-499-015, CB21-499-016, CB21-499-017, CB21-499-018, CB21-499-019, CB21-499-020, CB21-499-021, CB21-499-022, CB21-499-023, CB21-499-024, CB21-499-025, CB21-499-026, CB21-499-027, CB21-499-028, CB21-499-029, CB21-499-030, CB21-499-031, CB21-499-032, CB21-499-033, CB21-499-034, CB21-499-035, CB21-499-036, CB21-499-037, CB21-499-038, CB21-499-039, CB21-499-040, CB21-499-041, CB21-499-042, CB21-499-043, CB21-499-044, CB21-499-045, CB21-499-046, CB21-499-047, CB21-499-048, CB21-499-049, CB21-499-050, CB21-499-051, CB21-499-052, CB21-499-053, CB21-499-054, CB21-499-055, CB21-499-056, CB21-499-057, CB21-499-058, CB21-499-059, CB21-499-060, CB21-499-061, CB21-499-062, CB21-499-063, CB21-499-064, CB21-499-065, CB21-499-066, CB21-499-067, CB21-499-068, CB21-499-069, CB21-499-070, CB21-499-071, CB21-499-072, CB21-499-073, CB21-499-074, CB21-499-075, CB21-499-076, CB21-499-077, CB21-499-078, CB21-499-079, CB21-499-080, CB21-499-081, CB21-499-082, CB21-499-083, CB21-499-084, CB21-499-085, CB21-499-086, CB21-499-087, CB21-499-088, CB21-499-089, CB21-499-090, CB21-499-091, CB21-499-092, CB21-499-093, CB21-499-094, CB21-499-095, CB21-499-096, CB21-499-097, CB21-499-098, CB21-499-099, CB21-499-100, CB21-499-101, CB21-499-102, CB21-499-103, CB21-499-104, CB21-499-105, CB21-499-106, CB21-499-107, CB21-499-108, CB21-499-109, CB21-499-110, CB21-499-111, CB21-499-112, CB21-499-113, CB21-499-114, CB21-499-115, CB21-499-116, CB21-499-117, CB21-499-118, CB21-499-119, CB21-499-120, CB21-499-121, CB21-499-122, CB21-499-123, CB21-499-124, CB21-499-125, CB21-499-126, CB21-499-127, CB21-499-128, CB21-499-129, CB21-499-130, CB21-499-131, CB21-499-132, CB21-499-133, CB21-499-134, CB21-499-135, CB21-499-136, CB21-499-137, CB21-499-138, CB21-499-139, CB21-499-140, CB21-499-141, CB21-499-142, CB21-499-143, CB21-499-144, CB21-499-145, CB21-499-146, CB21-499-147, CB21-499-148, CB21-499-149, CB21-499-150, CB21-499-151, CB21-499-152, CB21-499-153, CB21-499-154, CB21-499-155, CB21-499-156, CB21-499-157, CB21-499-158, CB21-499-159, CB21-499-160, CB21-499-161, CB21-499-162, CB21-499-163, CB21-499-164, CB21-499-165, CB21-499-166, CB21-499-167, CB21-499-168, CB21-499-169, CB21-499-170, CB21-499-171, CB21-499-172, CB21-499-174, CB21-499-175, CB21-499-176, CB21-499-177, CB21-499-178, and CB21-499-179.

[0266] Embodiment 16: The antibody according to any one of embodiments 1-13, wherein the antigen or binding fragment comprises a heavy chain variable region and a light chain variable region comprising amino acid sequences as recited for an Identifier in Table 2 selected from the group consisting of CB21-499-177 and CB21-498-142.

[0267] Embodiment 17: An isolated nucleic acid encoding any one of the antibodies or antigen binding fragments of embodiments 1-16.

[0268] Embodiment 18: An expression vector comprising the isolated nucleic acid of embodiment 17.

[0269] Embodiment 19: A host cell comprising expression vector of embodiment 18.

[0270] Embodiment 20: The host cell of embodiment 19, which is a bacterial cell, a human cell, a mammalian cell, a Pichia cell, a plant cell, an HEK293 cell, or a CHO cell.

[0271] Embodiment 21: A composition comprising the antibody or antigen binding fragment of any one of embodiments 1-16 and a pharmaceutically acceptable carrier or diluent.

[0272] Embodiment 22: The composition according to embodiment 21, further comprising one or more agents selected from the group consisting of anti-CD27 antibody, anti-CD47 antibody, anti-APRIL antibody, anti-PD-1 antibody, anti-PD-L1 antibody, anti-TIGIT antibody, anti-CTLA4 antibody, anti-CS1 antibody, anti-KIR2DL1/2/3 antibody, anti-CD137 antibody, anti-GITR antibody, anti-PD-L2 antibody, anti-ILT1 antibody, anti-ILT2 antibody, anti-ILT3 antibody, anti-ILT4 antibody, anti-ILT5 antibody, anti-ILT6 antibody, anti-ILT7 antibody, anti-ILT8 antibody, anti-CD40 antibody, anti-OX40 antibody, anti-ICOS, anti-KIR2DL1 antibody, anti-KIR2DL2/3 antibody, anti-KIR2DL4 antibody, anti-KIR2DL5A antibody, anti-KIR2DL5B antibody, anti-KIR3DL1 antibody, anti-KIR3DL2 antibody, anti-KIR3DL3 antibody, anti-NKG2A antibody, anti-NKG2C antibody, anti-NKG2E antibody, anti-4-1BB antibody, anti-TSLP antibody, anti-IL-10 antibody, IL-10 PEGylated IL-10, an agonist (e.g., an agonistic antibody or antigen-binding fragment thereof, or a soluble fusion) of a TNF receptor protein, an Immunoglobulin-like protein, a cytokine receptor, an integrin, a signaling lymphocytic activation molecules (SLAM proteins), an activating NK cell receptor, a Toll like receptor, OX40, CD2, CD7, CD27, CD28, CD30, CD40, ICAM-1, LFA-1 (CDl 1a/CD18), 4-1BB (CD137), B7-H3, ICOS (CD278), GITR, BAFFR, LIGHT, HVEM (LIGHTR), KIRDS2, SLAMF7, NKp80 (KLRF1), NKp44, NKp30, NKp46, CD19, CD4, CD8alpha, CD8beta, IL2R beta, IL2R gamma, IL7R alpha, ITGA4, VLA1, CD49a, ITGA4, IA4, CD49D, ITGA6, VLA-6, CD49f, ITGAD, CDl 1d, ITGAE, CD103, ITGAL, ITGAM, CDl 1b, ITGAX, CDl 1c, ITGB1, CD29, ITGB2, CD18, ITGB7, NKG2D, NKG2C, TNFR2, TRANCE/RANKL, DNAM1 (CD226), SLAMF4 (CD244, 2B4), CD84, CD96 (Tactile), CEACAM1, CRTAM, Ly9 (CD229), CD160 (BY55), PSGL1, CD100 (SEMA4D), CD69, SLAMF6 (NTB-A, Ly108), SLAM (SLAMF1, CD150, IPO-3), SLAM7, BLAME (SLAMF8), SELPLG (CD162), LTBR, LAT, GADS, PAG/Cbp, CD19a, a ligand that specifically binds with CD83, an inhibitor of CD47, an inhibitor of PD-1, an inhibitor of PD-L1, an inhibitor of PD-L2, an inhibitor of CTLA4, an inhibitor of TIM3, an inhibitor of LAG3, an inhibitor of CEACAM (e.g., CEACAM-1, -3 and/or -5), an inhibitor of VISTA, an inhibitor of BTLA, an inhibitor of TIGIT, an inhibitor of LAIR1, an inhibitor of IDO, an inhibitor of TDO, an inhibitor of CD160, an inhibitor of TGFR beta, and a cyclic dinculeotide or other STING pathway agonist.

[0273] Embodiment 23: A method of producing an antibody or antigen binding fragment comprising:
[0274] culturing a host cell comprising one or more polynucleotides encoding any one of the antibodies or antigen binding fragments of embodiments 1-16 under conditions favorable to expression of the polynucleotide; and optionally, recovering the antibody or antigen binding fragment from the host cell and/or culture medium.

[0275] Embodiment 24: An antibody or antigen binding fragment according to any one of embodiments 1-16 or a composition according to embodiment 18 or 19, for the treatment of cancer.

[0276] Embodiment 25. A method of treating cancer in a human subject, comprising administering to the subject an effective amount of an antibody or antigen binding fragment of any one of claims 1-16, or an expression vector according to claim 18, or a composition according one of claim 21 or 22, optionally in association with a further therapeutic agent or therapeutic procedure.

### General Methods

[0277] Standard methods in molecular biology are described Sambrook, Fritsch and Maniatis (1982 & 1989 2^{nd} Edition, 2001 3^{rd} Edition) Molecular Cloning, A Laboratory Manual, Cold Spring Harbor Laboratory Press, Cold Spring Harbor, NY; Sambrook and Russell (2001) Molecular Cloning, 3^{rd} ed., Cold Spring Harbor Laboratory Press, Cold Spring Harbor, NY; Wu (1993) Recombinant DNA, Vol. 217, Academic Press, San Diego, CA). Standard methods also appear in Ausbel, et al. (2001) Current Protocols in Molecular Biology, Vols. 1-4, John Wiley and Sons, Inc. New York, NY, which describes cloning in bacterial cells and DNA mutagenesis (Vol. 1), cloning in mammalian cells and yeast (Vol. 2), glycoconjugates and protein expression (Vol. 3), and bioinformatics (Vol. 4).

[0278] Methods for protein purification including immunoprecipitation, chromatography, electrophoresis, centrifugation, and crystallization are described (Coligan, et al. (2000) Current Protocols in Protein Science, Vol. 1, John Wiley and Sons, Inc., New York). Chemical analysis, chemical modification, post-translational modification, production of fusion proteins, glycosylation of proteins are described (see, e.g., Coligan, et al. (2000) Current Protocols in Protein Science, Vol. 2, John Wiley and Sons, Inc., New York; Ausubel, et al. (2001) Current Protocols in Molecular Biology, Vol. 3, John Wiley and Sons, Inc., NY, NY, pp. 16.0.5-16.22.17; Sigma-Aldrich, Co. (2001) Products for Life Science Research, St. Louis, MO; pp. 45-89; Amersham Pharmacia Biotech (2001) BioDirectory, Piscataway, N.J., pp. 384-391). Production, purification, and fragmentation of polyclonal and monoclonal antibodies are described (Coligan, et al. (2001) Current Protocols in Immunology, Vol. 1, John Wiley and Sons, Inc., New York; Harlow and Lane (1999) Using Antibodies, Cold Spring Harbor Laboratory Press, Cold Spring Harbor, NY; Harlow and Lane, supra). Standard techniques for characterizing ligand/receptor interactions are available (see, e.g., Coligan, et al. (2001) Current Protocols in Immunology, Vol. 4, John Wiley, Inc., New York).

[0279] Monoclonal, polyclonal, and humanized antibodies can be prepared (see, e.g., Sheperd and Dean (eds.) (2000) Monoclonal Antibodies, Oxford Univ. Press, New York, NY; Kontermann and Dubel (eds.) (2001) Antibody Engineering, Springer-Verlag, New York; Harlow and Lane (1988) Antibodies A Laboratory Manual, Cold Spring Harbor Laboratory Press, Cold Spring Harbor, NY, pp. 139-243; Carpenter, et al. (2000) J. Immunol. 165:6205; He, et al. (1998) J. Immunol. 160:1029; Tang et al. (1999) J. Biol. Chem. 274:27371-27378; Baca et al. (1997) J. Biol. Chem. 272:10678-10684; Chothia et al. (1989) Nature 342:877-883; Foote and Winter (1992) J. Mol. Biol. 224:487-499; U.S. Pat. No. 6,329,511).

[0280] An alternative to humanization is to use human antibody libraries displayed on phage or human antibody libraries in transgenic mice (Vaughan et al. (1996) Nature Biotechnol. 14:309-314; Barbas (1995) Nature Medicine 1:837-839; Mendez et al. (1997) Nature Genetics 15:146-156; Hoogenboom and Chames (2000) Immunol. Today 21:371-377; Barbas et al. (2001) Phage Display: A Laboratory Manual, Cold Spring Harbor Laboratory Press, Cold Spring Harbor, New York; Kay et al. (1996) Phage Display of Peptides and Proteins: A Laboratory Manual, Academic Press, San Diego, CA; de Bruin et al. (1999) Nature Biotechnol. 17:397-399).

[0281] Single chain antibodies and diabodies are described (see, e.g., Malecki et al. (2002) Proc. Natl. Acad. Sci. USA 99:213-218; Conrath et al. (2001) J. Biol. Chem. 276:7346-7350; Desmyter et al. (2001) J. Biol. Chem. 276:26285-26290; Hudson and Kortt (1999) J. Immunol. Methods 231:177-189; and U.S. Pat. No. 4,946,778). Bifunctional antibodies are provided (see, e.g., Mack, et al. (1995) Proc. Natl. Acad. Sci. USA 92:7021-7025; Carter (2001) J. Immunol. Methods 248:7-15; Volkel, et al. (2001) Protein Engineering 14:815-823; Segal, et al. (2001) J. Immunol. Methods 248:1-6; Brennan, et al. (1985) Science 229:81-83; Raso, et al. (1997) J. Biol. Chem. 272:27623; Morrison (1985) Science 229:1202-1207; Traunecker, et al. (1991) EMBO J. 10:3655-3659; and U.S. Pat. Nos. 5,932,448, 5,532,210, and 6,129,914).

[0282] Bispecific antibodies are also provided (see, e.g., Azzoni et al. (1998) J. Immunol. 161:3493; Kita et al. (1999) J. Immunol. 162:6901; Merchant et al. (2000) J. Biol. Chem. 74:9115; Pandey et al. (2000) J. Biol. Chem. 275:38633; Zheng et al. (2001) J. Biol Chem. 276:12999; Propst et al. (2000) J. Immunol. 165:2214; Long (1999) Ann. Rev. Immunol. 17:875).

[0283] Purification of antigen is not necessary for the generation of antibodies. Animals can be immunized with cells bearing the antigen of interest. Splenocytes can then be isolated from the immunized animals, and the splenocytes can fused with a myeloma cell line to produce a hybridoma (see, e.g., Meyaard et al. (1997) Immunity 7:283-290; Wright et al. (2000) Immunity 13:233-242; Preston et al., supra; Kaithamana et al. (1999) J. Immunol. 163:5157-5164).

[0284] Antibodies can be conjugated, e.g., to small drug molecules, enzymes, liposomes, polyethylene glycol (PEG). Antibodies are useful for therapeutic, diagnostic, kit or other purposes, and include antibodies coupled, e.g., to dyes, radioisotopes, enzymes, or metals, e.g., colloidal gold (see, e.g., Le Doussal et al. (1991) J. Immunol. 146:169-175; Gibellini et al. (1998) J. Immunol. 160:3891-3898; Hsing and Bishop (1999) J. Immunol. 162:2804-2811; Everts et al. (2002) J. Immunol. 168:883-889).

[0285] Methods for flow cytometry, including fluorescence activated cell sorting (FACS), are available (see, e.g., Owens, et al. (1994) Flow Cytometry Principles for Clinical Laboratory Practice, John Wiley and Sons, Hoboken, NJ; Givan (2001) Flow Cytometry, 2^{nd} ed.; Wiley-Liss, Hoboken, NJ; Shapiro (2003) Practical Flow Cytometry, John Wiley and Sons, Hoboken, NJ). Fluorescent reagents suitable for modifying nucleic acids, including nucleic acid primers and probes, polypeptides, and antibodies, for use, e.g., as diagnostic reagents, are available (Molecular Probes (2003) Catalogue, Molecular Probes, Inc., Eugene, OR; Sigma-Aldrich (2003) Catalogue, St. Louis, MO).

[0286] Standard methods of histology of the immune system are described (see, e.g., Muller-Harmelink (ed.) (1986) Human Thymus: Histopathology and Pathology, Springer Verlag, New York, NY; Hiatt, et al. (2000) Color Atlas of Histology, Lippincott, Williams, and Wilkins, Phila, PA; Louis, et al. (2002) Basic Histology: Text and Atlas, McGraw-Hill, New York, NY).

[0287] Software packages and databases for determining, e.g., antigenic fragments, leader sequences, protein folding, functional domains, glycosylation sites, and sequence alignments, are available (see, e.g., GenBank, Vector NTI® Suite (Informax, Inc, Bethesda, MD); GCG Wisconsin Package (Accelrys, Inc., San Diego, CA); DeCypher® (TimeLogic Corp., Crystal Bay, Nevada); Menne, et al. (2000) Bioinformatics 16:741-742; Menne, et al. (2000) Bioinformatics Applications Note 16:741-742; Wren, et al. (2002) Comput. Methods Programs Biomed. 68:177-181; von Heijne (1983) Eur. J. Biochem. 133:17-21; von Heijne (1986) Nucleic Acids Res. 14:4683-4690).

### EXAMPLES

[0288] The following examples serve to illustrate the present invention. These examples are in no way intended to limit the scope of the invention.

### Example 1

[0289] Standard molecular cloning methods were used to construct plasmids for antibody expression. Antibody variable domains of anti-LY6G6D variants were synthesized as linear gene fragments by external provider Integrated DNA Technologies. Custom knob-human Fc, hole-human Fc, and light chain expression vectors were built from a pcDNA3.4 parental vector (Thermo Scientific). These custom antibody expression vectors were prepared by linearation with BamHI (NEB R3136M) digest. Gibson Assembly was subsequently performed with variable domain inserts using NEBuilder HiFi DNA Assembly Mastermix (cat. no. M5520AAVIAL). The resulting plasmid DNA was sequence verified by plasmid sequencing and scaled for transient transfection in Expi293 cells at 3 or 30 ml/antibody. Both IgG and bispecific TCE formats were produced for each clone.

[0290] Human (SEQ ID NO: 1) and Cynomolgus (NRMRCYNCGGSPSSSCKEAVTTCGEGRPQPGLEQIKLPGNPPVTLIHQHPACVA ARHCNQVETESVGDVTYPAHRDCYLGDLCNS; SEQ ID NO: 2667) LY6G6D ectodomains, truncating after the signal peptide and before the GPI anchor sequence, were cloned as N-terminal fusions with a GGGGS linker to mouse IgG2A Fc. Specifically, mouse IgG2A Fc utilized knob-in-hole mutations to monovalent protein display. The ectodomain-mouse Fc hole plasmid was co-transfected with empty knob mouse Fc into Expi293F cells with Expifectamine. Supernatant was harvested and NiNTA-purified after five days.

[0291] Protein Expression, Titers & Purification: All antibodies were expressed in and purified from Expi293F (Thermo Fisher Scientific) or modified Expi293 BirA-KDEL (PMID: 29359686) cells according to an established protocol from the manufacturer (Thermo Fisher Scientific). Briefly, pcDNA3.4 vector (Thermo Scientific) vector encoding the protein of interest was transiently transfected into Expi293F cells at a fixed density of 3×10⁶/mL using the Expifectamine transfection kit and manufacturer's protocol (Thermo Fisher Scientific). Expression volumes varied, but a fixed vector transfection reagent ratio (1 mg: 1 mL) was used. For multi-chain proteins, a stoichiometric equivalent of each respective vector was used. Culture media for BirA cells was additionally supplemented with 100 pM of biotin prior to transfection for in vivo biotinylation. Enhancing supplements from the Expifectamine kit were added 20 hours post-transfection. Cells were maintained for four days at 37° C. with 8% CO2 on a Celltron shaking platform (Infors) at 118 rpm. Culture supernatants were harvested and clarified via centrifugation at 4000×g for 45 mins. Fc-fusion proteins were purified by Protein A (Cytiva MabSelect PrismA) affinity chromatography and His-tagged proteins were purified by Ni-NTA (Roche cOmplete™ His-Tag Resin) affinity chromatography. For Protein A affinity chromatography, resin was washed 3-5× with at least 30-50 total bed volumes of 1×HBS (50 mM HEPES-NaOH pH 7.4+150 mM NaCl). Purified protein was eluted with 5 bed volumes of Pro A Elution Buffer (20 mM Acetate, pH 3.5 (Ricca Chemical). To neutralize the acidic eluates, Tris-HCl (pH 8.0) was added to the eluted fractions to a final concentration of 100 mM. For Ni-NTA affinity chromatography, resin was washed with a series of 10-20 bed volumes of three sequential wash buffers: Wash buffer 1 (1×HBS with 10 mM imidazole), Wash buffer 2 (0.5 mM EDTA in 1×HBS with 10 mM imidazole), Wash buffer 3 (0.5 M NaCl in 1×HBS with 10 mM imidazole). Purified protein was eluted with 500 mM imidazole in 1×HBS with 10% glycerol. Eluted fractions were buffer exchanged to 1×HBS with 10% glycerol. Purity and integrity were assessed by SDS-PAGE with 4-12% Mini-PROTEAN TGX stain-free precast gels (Bio-Rad). Samples were stored at either 4° C. or −80° C. with storage buffer in 50-uL or 100-uL aliquots.

[0292] Supernatant titer quantitation was performed accordingly. Briefly, supernatants from 24-well plates were harvested, centrifuged at 4000 g for 45 minutes to pellet expression cells, and clarified supernatants were transferred to a GatorBio BLI 96-well polypropylene flat plate. GatorBio BLI Protein A probes were used with standard manufactures protocol for sample quantitation to measure antibody concentrations. Sample concentrations were extrapolated from a standard curve generated with an IgG reference molecule diluted in Expi293F media.

### Example 2

[0293] The LY6G6D cyclic peptide was designed to interrogate and quantify the specificity of recognition of the protein region most proximal to the GPI anchor. The peptide sequence consisting of Ac-RDC*YLGDLC*NS-PEG2-3-mercaptopropionate, was designed with C* a disulfide bridge stabilized with a non-reducible methylene group (Chemitope Glycopeptide, custom order). The intention behind this conformationally-stabilized peptide was to recapitulate the predicted structure of the most-membrane-proximal peptide stretch as a specific peptide detection reagent. The mercaptoproprionate handle was utilized to conjugate this cyclic peptide into an octomerized multivalent reagent. A 7:1 ratio of Ac-RDC*YLGDLC*NS-PEG2-3-mercaptopropionate to SH-PEG-Biotin (Biopharma PEG HE003041-2K) was used to conjugate to a 8-Arm PEG-MAL, MW 10 k (Creative PEGWorks PSB-861). The NHS ester conjugation was quenched with fresh

[0294] 2-Mercaptoethanol (Sigma-Aldrich M6250). Finally, the octomer cyclic peptide was diluted to 100 uM with ethylene glycol (Sigma-Aldrich 102466). This peptide was coupled to streptavidin beads, and these peptide-bead complexes were utilized in a flow binding assays to detect peptide-specific binding. Here, beads are incubated with LY6G6D-binding supernatant or serum, and fluorescence signal is detected with species-specific secondary antibody.

[0295] Genetic immunization with Alloy ATX-GK BALB/c mice yielded strong reactive titers against LY6G6D-overexpression cells and the “RDCYLGDLCNS” cyclic peptide, representing the most membrane-proximal epitope of LY6G6D. Lymph node (CD138+) and bone marrow-derived (CD138+/CD45R−) plasma cells were enriched and then screened on the Bruker Cellular Analysis Beacon platform. A total of 194 cells were exported, cDNA was amplified, and binding was tested via transient heterologous expression.

[0296] Ultimately, 56 clones were recovered following re-evaluation of binding to LY6G6D-overexpression cells and the “RDCYLGDLCNS” cyclic peptide. CDRH3s were assembled into a guide tree alongside these binding data to begin mapping sequence-binding relationships as shown in FIG. 1A. A branch of eleven related antibody sequences (identified as CB21-469, CB21-470, CB21-471, CB21-477, CB21-498, CB21-499, CB21-500, CB21-502, CB21-512, CB21-513 and CB21-522) demonstrating strong binding to a target membrane-proximal epitope on LY6G6D, were selected for further study. A Martin tree alignment of the heavy chain CDR3 and the corresponding binding characteristics are shown in FIG. 1B.

[0297] A related branch that exhibited cell binding but not the desired target peptide binding was identified as including antibodies CB21-519, CB21-509, CB21-505, CB21-520, CB21-487, CB21-494, CB21-496, CB21-497, and CB21-508.

### Example 3

[0298] Anti-LY6G6D clones were screened for binding to LY6G6D ectodomain constructs as described above (Human construct referred to in the Figures as “CP203”) by Biolayer Interferometry (BLI) using a Gator Bio Plus instrument. Binding was analyzed using Streptaidin (SA) probes to capture biotinylated LY6G6D ectodomain protein at 20 nM, followed by a 300s association of LY6G6D monovalent antibody in a concentration series from 100 nM diluted 4-fold down to 6.25 nM. A dissociation step was performed in Gator Q buffer and kinetics were determined using a 1:1 Langmuir binding model processed using Gator analysis software.

[0299] The Multipoint BLI kinetic analysis of LY6G6D binding by the 11 parental antibody clones described in FIGS. 1A and B are depicted in FIGS. 2A and B, showing a range of association and dissociation rates against recombinant monovalent LY6G6D ECD Fc-fusion protein.

### Example 4

### Baculovirus Particle ELISA (BVP-ELISA)

[0300] Baculovirus Particle ELISA was used to evaluate the polyspecificity of test antibodies by measuring their binding to baculovirus-derived particles. Baculovirus particles were immobilized onto a 96-well ELISA plate using standard coating procedures. Each test antibody was then added at a concentration of 100 g/mL and incubated to allow binding to the particles. Detection of bound antibody was performed using an anti-human Fc secondary antibody conjugated to horseradish peroxidase (HRP), followed by colorimetric development. Elevated binding to baculovirus particles is indicative of increased nonspecific interactions and may correlate with reduced in vivo stability, including accelerated serum clearance.

[0301] Parental antibodies CB21-498, CB21-499, CB21-512, CB21-476, and CB21-501 were evaluated for polyreactivity using the BVP ELISA. As shown in FIG. 3, all clones exhibited low polyreactivity comparable to or lower than the reference antibody enokizumab, and significantly lower than gantenerumab, a known highly polyreactive antibody. These clones also demonstrated slightly lower polyreactivity than the literature-reported LY6G6D binder 20A12.QNTv12.

[0302] Three parental antibody clones (CB21-498, CB21-499, and CB21-512) were subjected to accelerated thermal stress at 40° C. for 14 days and analyzed by SEC-HPLC at T0 and Day 14. Analytical Size Exclusion Chromatography: SEC-HPLC was performed on a Thermo Scientific Vanquish Flex UHPLC system. Proteins were injected neat, with 2.5 μg loaded onto a MabPAC™ SEC-1 4×50 mm (5 μm) column, using a Mobile Phase of 50 mM Sodium Phosphate and 0.3M Sodium Chloride, at pH 6.8. Acquisition of chromatograms were acquired continuously at 280 nm and analyzed using Thermo Scientific's Chromeleon 7 software. As shown in FIG. 4, all three clones demonstrated minimal change in aggregate levels, indicating resistance to thermal degradation and low formation of high molecular weight (HMW) species.

### Example 5

### AbMap (Antibody Binding Epitope Mapping)

[0303] AbMap was carried out using NEB's Ph.D.12 Phage Display Library (NEB E8210S), a combinatorial library of random 12-mer peptides displayed on M13 phage. The phage library was first amplified, purified, and quantified. Approximately 1011 plaque-forming units were incubated overnight with 0.4 μg of the antibody. Antibody-bound phage were captured post-incubation using Dynabeads Protein G (Thermo Scientific). Bound phage were then lysed at 95° C. for 10 minutes, and two rounds of PCR were used to amplify peptide-coding sequences and append Illumina adapters. The resulting libraries were sequenced on an Illumina NextSeq 2000 platform using paired-end 2×100 bp reads. Sequencing data was quality filtered, and peptide abundance was quantified relative to a no-antibody control. De-novo peptide motifs were computationally derived from the set of enriched peptides and subsequently mapped onto the linear sequence of the target protein, enabling high-resolution localization of antibody-binding epitopes.

### Example 6

### In Silico Antibody Engineering

[0304] For thermostability and aggregation propensity analysis, Schrödinger BioLuminate was used. Structural models were first generated from primary antibody sequences using ABodyBuilder2 (Abanades et al., Communications Biology, 2023), and these models served as the input for structure-based calculations in BioLuminate. Aggregation risk was predicted using surface descriptor analysis, while thermostability was evaluated through residue scanning with ΔΔG calculations. Additional variant suggestions were obtained from a general protein language model-based tool for antibody optimization (Hie et al., Nature Biotechnology, 2024).

### Example 7

[0305] Lead optimization engineering rounds for CB21-498

### Overview:

| | | Key mutations |
|---|---|---|
| Round | CB21-498 goals | identified |
| 1 | Shuffle related heavy and light chains | LC: CB21-469 |
| 2 | Remove liabilities, test LLM | H: M2V, H: N54S, |
| | | L: G34A, L: A72S |
| 3 | Remove liabilities, focused on unpaired | H: C47G |
| | Cys | |
| 4 | Reduce aggregation | |
| 5 | Merge liability-scrubbing mutations | |
| 6 | Bump titers via aggregation/stability | H: K43R, H: T69Q, |
| | | H: S31D |
| 7 | Final merge of aggregation/stability/ | |
| | titer mutations | |

[0306] In round 1, heavy and light chains from CB21-469, CB21-498, CB21-500, and CB21-513 were recombinantly shuffled. Surprisingly, the light chain from CB21-469 paired with the heavy chain from CB21-499 was found to improve binding strength, as measured by BLI as shown in the following table.

TABLE 8

| | Heavy | Light | | | |
|---|---|---|---|---|---|
| Protein | chain from: | chain from: | KD (M) | Kon (1/Ms) | Koff (1/s) |
| CP1470 | CB21-469 | CB21-498 | | | |
| CP1471 | CB21-469 | CB21-500 | 1.27 × 10⁻⁸ | 1.34 × 10⁵ | 1.70 × 10−03 |
| CP1472 | CB21-469 | CB21-513 | | | |
| CP1473 | CB21-498 | CB21-469 | 5.54 × 10⁻¹⁰ | 1.52 × 10⁵ | 8.40 × 10⁻⁵ |
| CP1474 | CB21-498 | CB21-500 | 6.99 × 10⁻¹⁰ | 1.41 × 10⁵ | 9.87 × 10⁻⁵ |
| CP1475 | CB21-498 | CB21-513 | 9.10 × 10⁻¹⁰ | 1.16 × 10⁵ | 1.05 × 10⁻⁴ |
| CP1476 | CB21-500 | CB21-469 | 3.15 × 10⁻⁹ | 1.31 × 10⁵ | 4.13 × 10⁻⁴ |
| CP1477 | CB21-500 | CB21-498 | | | |
| CP1478 | CB21-500 | CB21-513 | 5.35 × 10⁻⁹ | 1.32 × 10⁵ | 7.05 × 10⁻⁴ |
| CP1479 | CB21-513 | CB21-469 | 1.65 × 10⁻⁸ | 3.22 × 10⁴ | 5.30 × 10⁻⁴ |
| CP1480 | CB21-513 | CB21-498 | | | |
| CP1481 | CB21-513 | CB21-500 | 1.76 × 10⁻⁸ | 1.50 × 10⁴ | 2.64 × 10⁻⁴ |

[0307] In round 2, putative solvent-accessible chemical liabilities inherent in the parent binder and germline reversion of unusual residues were addressed without impacting affinity or other biophysical properties. Mutations suggested by a recently published large language model (LLM)-based tool for antibody optimization (Hie et al., Nat Biotechnol 2024 PMID: 37095349) were considered, though none of these mutations resulted in significant improvements to binding. A substitution M2V (FIG. 5) addressed an unusual methionine and potential oxidation liability. The mutation N54S mitigated a potential deamidation site in CDRH2. G34A (FIG. 6) was introduced to reduce deamidation risk in CDRL1. A72S was selected to replace an unusual residue. However, an unpaired cystine C47 could not be removed without negatively impacting binding.

[0308] In silico analysis was performed to identify positions where mutation could potentially improve thermostability or reduce aggregation propensity. In particular, residue T69 was identified as a potential contributor to both properties. Through mutagenesis, the T69Q substitution was found to improve physical properties while maintaining potent binding (FIG. 7).

### Example 8

### Lead Optimization Engineering Rounds for CB21-498

### Overview:

| | | Key mutations |
|---|---|---|
| Round | CB21-499 goals | identified |
| 1 | Shuffle related heavy and light chains | N/A |
| 2 | Remove liabilities, test LLM | H: G55A, H: D62P |
| 3 | Merge liability-scrubbing mutations, | H: D59E |
| | improve thermostability | |
| 4 | Final merge of affinity-bumping mutation | |

[0309] In round 1 of CB21-499 engineering, closely related sequences containing the same CDRH3 from the original Beacon screen were identified. Heavy and light chains from CB21-471, CB21-477, and CB21-499 were recombinantly shuffled. Shuffling yielded no improvement over the original CB21-499 pairing, which remained the optimal clone in terms of binding affinity.

[0310] In round 2, two potential sites of isomerization and proteolysis were targeted for removal. Through mutagenesis, G55A in CDRH2 and D62P in HFR3 were identified as substitutions that mitigated these liabilities without significantly impacting binding affinity. Mutations suggested by a recently published large language model (LLM)-based tool for antibody optimization did not yield meaningful improvements in affinity.

[0311] In round 3, CB21-499 physical liabilities were targeted, with a particular focus on improving thermostability. In silico analysis was performed to identify positions where mutation could potentially enhance thermostability. Through mutagenesis across 14 selected positions, we identified a D59E substitution in CDRH2 that, unexpectedly, improved both predicted thermostability and binding affinity as measured by BLI (FIG. 8).

### Example 9

### Characterization of CB21-498 and CB21-499 Antibody Families

[0312] An isoaffinity plot of BLI kinetic analysis shows association (Kon) and dissociation (Koff) rates for CB21-498 and CB21-499 clonal variants binding to LY6G6D is shown in FIG. 9. Clones derived from the CB21-498 lineage are shown as filled circles, and those from CB21-499 are shown as open squares. Diagonal lines represent isoaffinity bands for 10 nM, 1 nM, and 0.1 nM apparent KD.

[0313] A BLI-derived binding affinity plot showing cross-reactivity of CB21-498 (gray) and CB21-499 (black) clonal variants to human and cynomolgus monkey LY6G6D proteins is shown in FIG. 10. Comparable KD values were observed for both species, indicating similar binding affinities across species.

[0314] Affinity-Capture Self-Interaction Nanoparticle Spectroscopy (AC-SINS) analysis was performed to assess the colloidal stability and self-association propensity of optimized clones, a common approach for evaluating antibody developability. A plate-based method utilized gold nanoparticles to capture test proteins of interest via affinity capture. Gold nanoparticles were coated with an anti-human Fc antibody and incubated with either control monoclonal antibodies or samples of interest. Absorbance was measured, and the maximum absorption wavelength (λmax) was determined. The shift in λmax (Δλmax, in nanometers) was calculated by subtracting the λmax obtained in the absence of antibody from the λmax measured for each sample. Test proteins that possess a propensity to self-associate will aggregate the particles, resulting in a change in the wavelength of maximum absorbance. A greater shift signifies a greater degree of self-association, which may imply that such proteins are less suitable for drug development as they may exhibit issues with high concentration formulation.

[0315] Test antibodies were benchmarked against a broad panel of clinical-stage antibodies used as developability standards. As shown in FIG. 11, clones derived from CB21-498-142 and CB21-499-177 exhibited favorable AC-SINS profiles, comparable to each other and to the literature-reported LY6G6D binder 20A12.QNTv12.

[0316] BVP-ELISA analysis was conducted to assess the polyreactivity of optimized clones, a commonly evaluated parameter in antibody developability characterization. Test clones were benchmarked against a panel of clinical-stage antibodies and the literature-reported LY6G6D binder 20A12.QNTv12. As shown in FIG. 12, optimized clones derived from CB21-498-142 and CB21-499-177 exhibited low polyreactivity, with OD450 values falling in the favorable range (<0.7) and well below those of several clinical-stage antibodies known to exhibit elevated polyreactivity. These clones also demonstrated slightly more favorable scores than 20A12.QNTv12, which showed a moderately elevated polyreactivity profile.

[0317] SPR multipoint kinetic analyses against human and cynomolgus monkey LY6G6D was also performed. LY6G6D binding kinetics were performed via surface plasmon resonance (SPR) on a Biacore 8K+. A Mouse Antibody Capture Kit, type 2 (Cytiva 29215281) was used for amine coupling to a CM5 sensor chip (BR100530) and the immobilization was performed exactly according to the manufacturer's standard settings. To begin an SPR run, 7 startup cycles were run following chip immobilization to establish sensor stability. In these, LY6G6D-mouse Fc fusion antigen was first flowed into just flow cell 2 at 10 uL/min at a 5 nM concentration with a 120 sec contact time. 1×HBS-EP+ buffer, pH 7.6 was then flowed at 30 μL/min with a 420 sec contact time into the chip. Finally regeneration solution (10 mM Glycine-HCl pH 1.7) was flowed at 30 uL/min with a 120 sec contact time.

[0318] After this point, 16 analysis cycles were run, 8 first with human LY6G6D-mouse Fc fusion antigen and 8 next for cyno LY6G6D-mouse Fc fusion antigen. In both antigen formats, the antigen was captured at 10 uL/min at a 5 nM concentration diluted into 1×HBS-EP+ buffer, pH 7.6 with a 120 sec contact time. Next, selected antibodies diluted into 1×HBS-EP+ buffer, pH 7.6 were run as the analytes across a 7-point dilution series, 50 nM to 0.7813 nM with two-fold dilutions. A contact time of 300 sec followed by dissociation time of 1200 sec at a flow rate of 30 μL/min was used. Regeneration solution (10 mM Glycine-HCl pH 1.7) was flowed at 30 μL/min with a 120 sec contact time. Finally, a wait step of 60 sec with flow rate of 30 μL/min 1×HBS-EP+ buffer, pH 7.6 was used to re-establish sensor stability. These SPR binding studies were performed at 25° C.

[0319] In both species, CB21-499-177 demonstrated a slower off-rate and improved binding affinity relative to the benchmark antibody 20A12.QNTv12, highlighting its enhanced target engagement. All clones tested showed comparable binding to human and cyno LY6G6D.

TABLE 9
SPR multipoint human LY6G6D binding
kinetics for optimized clones

| | 20A12.QNTv12 | CB21-498-142 | CB21-499-177 |
|---|---|---|---|
| ka (1/Ms) | 1.09 × 10⁵ | 9.67 × 10⁴ | 1.85 × 10⁵ |
| Kd (1/s) | 3.00 × 10⁻⁴ | 3.10 × 10⁻⁴ | 7.12 × 10⁻⁵ |
| Rmax (RU) | 69.3 | 75.7 | 89.7 |
| KD (M) | 3.67 × 10⁻⁹ | 3.20 × 10⁻⁹ | 3.85 × 10⁻¹⁰ |

TABLE 10
SPR multipoint cyno LY6G6D binding
kinetics for optimized clones

| | 20A12.QNTv12 | CB21-498-142 | CB21-499-177 |
|---|---|---|---|
| ka (1/Ms) | 1.12 × 10⁵ | 8.05 × 10⁴ | 1.66 × 10⁵ |
| Kd (1/s) | 3.80 × 10⁻⁴ | 4.48 × 10⁻⁴ | 1.49 × 10⁻⁴ |
| Rmax (RU) | 56.5 | 67.3 | 74.9 |
| KD (M) | 3.40 × 10⁻⁹ | 5.57 × 10⁻⁹ | 9.00 × 10⁻¹⁰ |

[0320] Epitope mapping was performed using AbMap to compare CB21-499-177, CB21-498, and the reference antibody 20A12.QNTv12. All three antibodies mapped to a similar region on the LY6G6D ECD, centered around the YLGDL motif, with subtle differences in fine specificity as shown in FIG. 13. AbMap phage enrichments were performed in triplicate and a representative sequence logo plot is shown for each antibody clone. These results suggest that while the antibodies share a common membrane-proximal epitope, the core binding region is distinct to each clone.

[0321] All references cited herein are incorporated by reference to the same extent as if each individual publication, database entry (e.g. Genbank sequences or GeneID entries), patent application, or patent, was specifically and individually indicated to be incorporated by reference. This statement of incorporation by reference is intended by Applicants, pursuant to 37 C.F.R. § 1.57(b)(1), to relate to each and every individual publication, database entry (e.g. Genbank sequences or GeneID entries), patent application, or patent, each of which is clearly identified in compliance with 37 C.F.R. § 1.57(b)(2), even if such citation is not immediately adjacent to a dedicated statement of incorporation by reference. The inclusion of dedicated statements of incorporation by reference, if any, within the specification does not in any way weaken this general statement of incorporation by reference. Citation of the references herein is not intended as an admission that the reference is pertinent prior art, nor does it constitute any admission as to the contents or date of these publications or documents. To the extent that the references provide a definition for a claimed term that conflicts with the definitions provided in the instant specification, the definitions provided in the instant specification shall be used to interpret the claimed invention.

[0322] While the invention has been described and exemplified in sufficient detail for those skilled in this art to make and use it, various alternatives, modifications, and improvements should be apparent without departing from the spirit and scope of the invention. The examples provided herein are representative of preferred embodiments, are exemplary, and are not intended as limitations on the scope of the invention. Modifications therein and other uses will occur to those skilled in the art. These modifications are encompassed within the spirit of the invention and are defined by the scope of the claims.

[0323] It will be readily apparent to a person skilled in the art that varying substitutions and modifications may be made to the invention disclosed herein without departing from the scope and spirit of the invention.

[0324] All patent applications, patents, publications and other references mentioned in the specification are indicative of the levels of those of ordinary skill in the art to which the invention pertains and are each incorporated herein by reference. The references cited herein are not admitted to be prior art to the claimed invention.

[0325] Unless otherwise defined, all technical and scientific terms used herein have the same meaning as commonly understood by one of ordinary skill in the art to which this invention belongs. In the case of conflict, the present specification, including definitions, will control.

[0326] The use of the articles “a”, “an”, and “the” in both the description and claims are to be construed to cover both the singular and the plural, unless otherwise indicated herein or clearly contradicted by context. The terms “comprising”, “having”, “being of” as in “being of a chemical formula”, “including”, and “containing” are to be construed as open terms (i.e., meaning “including but not limited to”) unless otherwise noted. Additionally, whenever “comprising” or another open-ended term is used in an embodiment, it is to be understood that the same embodiment can be more narrowly claimed using the intermediate term “consisting essentially of” or the closed term “consisting of”.

[0327] The term “about”, “approximately”, or “approximate”, when used in connection with a numerical value, means that a collection or range of values is included. For example, “about X” includes a range of values that are ±20%, ±10%, ±5%, ±2%, ±1%, ±0.5%, ±0.2%, or ±0.1% of X, where X is a numerical value. In one embodiment, the term “about” refers to a range of values which are 10% more or less than the specified value. In another embodiment, the term “about” refers to a range of values which are 5% more or less than the specified value. In another embodiment, the term “about” refers to a range of values which are 1% more or less than the specified value.

[0328] Recitation of ranges of values are merely intended to serve as a shorthand method of referring individually to each separate value falling within the range, unless otherwise indicated herein, and each separate value is incorporated into the specification as if it were individually recited herein. A range used herein, unless otherwise specified, includes the two limits of the range. For example, the terms “between X and Y” and “range from X to Y, are inclusive of X and Y and the integers there between. On the other hand, when a series of individual values are referred to in the disclosure, any range including any of the two individual values as the two end points is also conceived in this disclosure. For example, the expression “a dose of about 100 mg, 200 mg, or 400 mg” can also mean “a dose ranging from 100 to 200 mg”, “a dose ranging from 200 to 400 mg”, or “a dose ranging from 100 to 400 mg”.

[0329] The invention illustratively described herein suitably may be practiced in the absence of any element or elements, limitation or limitations which is not specifically disclosed herein. Thus, for example, in each instance herein any of the terms “comprising”, “consisting essentially of” and “consisting of” may be replaced with either of the other two terms. The terms and expressions which have been employed are used as terms of description and not of limitation, and there is no intention that in the use of such terms and expressions of excluding any equivalents of the features shown and described or portions thereof, but it is recognized that various modifications are possible within the scope of the invention claimed. Thus, it should be understood that although the present invention has been specifically disclosed by preferred embodiments and optional features, modification and variation of the concepts herein disclosed may be resorted to by those skilled in the art, and that such modifications and variations are considered to be within the scope of this invention as defined by the appended claims.

The application's sequence listing, which the Patent Office published only in electronic form, follows.

SEQUENCE LISTING (2671 sequences)

SEQ ID NO: 1 - protein, 85 aa, Homo sapiens
NRMRCYNCGGSPSSSCKEAVTTCGEGRPQPGLEQIKLPGNPPVTLIHQHPACVAAHHCNQVETESVGDVTYPAHRDCYLGDLCNS

SEQ ID NO: 2 - protein, 5 aa, synthetic construct
SYAMN

SEQ ID NO: 3 - protein, 17 aa, synthetic construct
GISGNGGRIYYADSVKG

SEQ ID NO: 4 - protein, 4 aa, synthetic construct
DLDV

SEQ ID NO: 5 - protein, 16 aa, synthetic construct
RSSQSLVHSDGNTYLN

SEQ ID NO: 6 - protein, 7 aa, synthetic construct
KISNRFS

SEQ ID NO: 7 - protein, 9 aa, synthetic construct
MQATQFPLT

SEQ ID NO: 8 - protein, 5 aa, synthetic construct
SYGMH

SEQ ID NO: 9 - protein, 17 aa, synthetic construct
VLWYDGINKNYADSVKG

SEQ ID NO: 10 - protein, 5 aa, synthetic construct
VQGDY

SEQ ID NO: 11 - protein, 11 aa, synthetic construct
RASQGIRNDLT

SEQ ID NO: 12 - protein, 7 aa, synthetic construct
DTSSLQS

SEQ ID NO: 13 - protein, 9 aa, synthetic construct
LQHNSYPFT

SEQ ID NO: 14 - protein, 5 aa, synthetic construct
SYGMH

SEQ ID NO: 15 - protein, 17 aa, synthetic construct
VIWYDGSNKDYVDSVKG

SEQ ID NO: 16 - protein, 6 aa, synthetic construct
PGEGDY

SEQ ID NO: 17 - protein, 11 aa, synthetic construct
RASQGIRNDFG

SEQ ID NO: 18 - protein, 7 aa, synthetic construct
GASSLQS

SEQ ID NO: 19 - protein, 9 aa, synthetic construct
LQQNSYPWT

SEQ ID NO: 20 - protein, 5 aa, synthetic construct
SYGMH

SEQ ID NO: 21 - protein, 17 aa, synthetic construct
VIWYDGSNKDYADSVKG

SEQ ID NO: 22 - protein, 6 aa, synthetic construct
PGEGDY

SEQ ID NO: 23 - protein, 11 aa, synthetic construct
RASQGIRNDLG

SEQ ID NO: 24 - protein, 7 aa, synthetic construct
AASSLQS

SEQ ID NO: 25 - protein, 9 aa, synthetic construct
LQQNSYPWT

SEQ ID NO: 26 - protein, 5 aa, synthetic construct
SYAMN

SEQ ID NO: 27 - protein, 17 aa, synthetic construct
GMSGSGGRIYYADSVKG

SEQ ID NO: 28 - protein, 4 aa, synthetic construct
DLDV

SEQ ID NO: 29 - protein, 16 aa, synthetic construct
RSSQNLVHSDGNTYLN

SEQ ID NO: 30 - protein, 7 aa, synthetic construct
KISNRFS

SEQ ID NO: 31 - protein, 9 aa, synthetic construct
MQATQFPLT

SEQ ID NO: 32 - protein, 5 aa, synthetic construct
SYGMH

SEQ ID NO: 33 - protein, 17 aa, synthetic construct
VLWYDGINKNYVDSVKG

SEQ ID NO: 34 - protein, 5 aa, synthetic construct
VQGDY

SEQ ID NO: 35 - protein, 11 aa, synthetic construct
RASQGIRNDLT

SEQ ID NO: 36 - protein, 7 aa, synthetic construct
DTSSLQS

SEQ ID NO: 37 - protein, 9 aa, synthetic construct
LQHNIYPFT

SEQ ID NO: 38 - protein, 5 aa, synthetic construct
SYGMH

SEQ ID NO: 39 - protein, 17 aa, synthetic construct
VLWYDGINKNYADSVKG

SEQ ID NO: 40 - protein, 5 aa, synthetic construct
VQGDY

SEQ ID NO: 41 - protein, 11 aa, synthetic construct
RASQGIRNDLT

SEQ ID NO: 42 - protein, 7 aa, synthetic construct
DTSSLQS

SEQ ID NO: 43 - protein, 9 aa, synthetic construct
LQHNIYPFT

SEQ ID NO: 44 - protein, 5 aa, synthetic construct
SYAMT

SEQ ID NO: 45 - protein, 17 aa, synthetic construct
GISGSGGVTDYADSVKG

SEQ ID NO: 46 - protein, 4 aa, synthetic construct
DLGV

SEQ ID NO: 47 - protein, 16 aa, synthetic construct
RSSQSLVHSDGNTYLN

SEQ ID NO: 48 - protein, 7 aa, synthetic construct
KISNRFS

SEQ ID NO: 49 - protein, 9 aa, synthetic construct
MQATQFPLT

SEQ ID NO: 50 - protein, 5 aa, synthetic construct
GYFIH

SEQ ID NO: 51 - protein, 17 aa, synthetic construct
WINPNSGGTYYAQEFQG

SEQ ID NO: 52 - protein, 8 aa, synthetic construct
DISLVGDY

SEQ ID NO: 53 - protein, 16 aa, synthetic construct
RSSQSLVYSDGNTYLN

SEQ ID NO: 54 - protein, 7 aa, synthetic construct
KVSNRDS

SEQ ID NO: 55 - protein, 9 aa, synthetic construct
MQGSHWPLT

SEQ ID NO: 56 - protein, 5 aa, synthetic construct
SYAMN

SEQ ID NO: 57 - protein, 17 aa, synthetic construct
GISGNGGRIYYAESVKG

SEQ ID NO: 58 - protein, 4 aa, synthetic construct
DLDV

SEQ ID NO: 59 - protein, 16 aa, synthetic construct
RSSQSLVHSDGNTYLN

SEQ ID NO: 60 - protein, 7 aa, synthetic construct
KISNRFS

SEQ ID NO: 61 - protein, 9 aa, synthetic construct
MQATQFPLT

SEQ ID NO: 62 - protein, 5 aa, synthetic construct
SYAMN

SEQ ID NO: 63 - protein, 17 aa, synthetic construct
GISGNGGRIYYAESVKG

SEQ ID NO: 64 - protein, 4 aa, synthetic construct
DLDV

SEQ ID NO: 65 - protein, 16 aa, synthetic construct
RSSQSLVHSDGNTYLN

SEQ ID NO: 66 - protein, 7 aa, synthetic construct
KISNRFS

SEQ ID NO: 67 - protein, 9 aa, synthetic construct
MQATQFPLT

SEQ ID NO: 68 - protein, 5 aa, synthetic construct
SYAMN

SEQ ID NO: 69 - protein, 17 aa, synthetic construct
GISGNGGRIYYAESVKG

SEQ ID NO: 70 - protein, 4 aa, synthetic construct
DLDV

SEQ ID NO: 71 - protein, 16 aa, synthetic construct
RSSQSLVHSDGNTYLN

SEQ ID NO: 72 - protein, 7 aa, synthetic construct
KISNRFS

SEQ ID NO: 73 - protein, 9 aa, synthetic construct
MQATQFPLT

SEQ ID NO: 74 - protein, 5 aa, synthetic construct
SYAMN

SEQ ID NO: 75 - protein, 17 aa, synthetic construct
GISGNAGRIYYAESVKG

SEQ ID NO: 76 - protein, 4 aa, synthetic construct
DLDV

SEQ ID NO: 77 - protein, 16 aa, synthetic construct
RSSQSLVHSDGNTYLN

SEQ ID NO: 78 - protein, 7 aa, synthetic construct
KISNRFS

SEQ ID NO: 79 - protein, 9 aa, synthetic construct
MQATQFPLT

SEQ ID NO: 80 - protein, 5 aa, synthetic construct
SYAMN

SEQ ID NO: 81 - protein, 17 aa, synthetic construct
GISGNPGRIYYAESVKG

SEQ ID NO: 82 - protein, 4 aa, synthetic construct
DLDV

SEQ ID NO: 83 - protein, 16 aa, synthetic construct
RSSQSLVHSDGNTYLN

SEQ ID NO: 84 - protein, 7 aa, synthetic construct
KISNRFS

SEQ ID NO: 85 - protein, 9 aa, synthetic construct
MQATQFPLT

SEQ ID NO: 86 - protein, 5 aa, synthetic construct
SYAMN

SEQ ID NO: 87 - protein, 17 aa, synthetic construct
GISGQGGRIYYAESVKG

SEQ ID NO: 88 - protein, 4 aa, synthetic construct
DLDV

SEQ ID NO: 89 - protein, 16 aa, synthetic construct
RSSQSLVHSDGNTYLN

SEQ ID NO: 90 - protein, 7 aa, synthetic construct
KISNRFS

SEQ ID NO: 91 - protein, 9 aa, synthetic construct
MQATQFPLT

SEQ ID NO: 92 - protein, 5 aa, synthetic construct
SYAMN

SEQ ID NO: 93 - protein, 17 aa, synthetic construct
GISGSGGRIYYAESVKG

SEQ ID NO: 94 - protein, 4 aa, synthetic construct
DLDV

SEQ ID NO: 95 - protein, 16 aa, synthetic construct
RSSQSLVHSDGNTYLN

SEQ ID NO: 96 - protein, 7 aa, synthetic construct
KISNRFS

SEQ ID NO: 97 - protein, 9 aa, synthetic construct
MQATQFPLT

SEQ ID NO: 98 - protein, 5 aa, synthetic construct
SYAMN

SEQ ID NO: 99 - protein, 17 aa, synthetic construct
GISGNGGRIYYAESVKG

SEQ ID NO: 100 - protein, 4 aa, synthetic construct
DLDV

SEQ ID NO: 101 - protein, 16 aa, synthetic construct
RSSQSLVHSDGNTYLN

SEQ ID NO: 102 - protein, 7 aa, synthetic construct
KISNRFS

SEQ ID NO: 103 - protein, 9 aa, synthetic construct
MQATQFPLT

SEQ ID NO: 104 - protein, 5 aa, synthetic construct
SYAMN

SEQ ID NO: 105 - protein, 17 aa, synthetic construct
GISGNGGRIYYAESVKG

SEQ ID NO: 106 - protein, 4 aa, synthetic construct
DLDV

SEQ ID NO: 107 - protein, 16 aa, synthetic construct
RSSQSLVHSDGNTYLN

SEQ ID NO: 108 - protein, 7 aa, synthetic construct
KISNRFS

SEQ ID NO: 109 - protein, 9 aa, synthetic construct
MQATQFPLT

SEQ ID NO: 110 - protein, 5 aa, synthetic construct
SYAMN

SEQ ID NO: 111 - protein, 17 aa, synthetic construct
GISGNGGSIYYAESVKG

SEQ ID NO: 112 - protein, 4 aa, synthetic construct
DLDV

SEQ ID NO: 113 - protein, 16 aa, synthetic construct
RSSQSLVHSDGNTYLN

SEQ ID NO: 114 - protein, 7 aa, synthetic construct
KISNRFS

SEQ ID NO: 115 - protein, 9 aa, synthetic construct
MQATQFPLT

SEQ ID NO: 116 - protein, 5 aa, synthetic construct
SYAMN

SEQ ID NO: 117 - protein, 17 aa, synthetic construct
GISGNGGRIYYAESVKG

SEQ ID NO: 118 - protein, 4 aa, synthetic construct
DLDV

SEQ ID NO: 119 - protein, 16 aa, synthetic construct
RSSQSLVHSDGNTYLN

SEQ ID NO: 120 - protein, 7 aa, synthetic construct
KISNRFS

SEQ ID NO: 121 - protein, 9 aa, synthetic construct
MQATQFPLT

SEQ ID NO: 122 - protein, 5 aa, synthetic construct
SYAMN

SEQ ID NO: 123 - protein, 17 aa, synthetic construct
GISGNGGRIYYAESVKG

SEQ ID NO: 124 - protein, 4 aa, synthetic construct
DLDV

SEQ ID NO: 125 - protein, 16 aa, synthetic construct
RSSQSLVHSDANTYLN

SEQ ID NO: 126 - protein, 7 aa, synthetic construct
KISNRFS

SEQ ID NO: 127 - protein, 9 aa, synthetic construct
MQATQFPLT

SEQ ID NO: 128 - protein, 5 aa, synthetic construct
SYAMN

SEQ ID NO: 129 - protein, 17 aa, synthetic construct
GISGNGGRIYYAESVKG

SEQ ID NO: 130 - protein, 4 aa, synthetic construct
DLDV

SEQ ID NO: 131 - protein, 16 aa, synthetic construct
RSSQSLVHSDINTYLN

SEQ ID NO: 132 - protein, 7 aa, synthetic construct
KISNRFS

SEQ ID NO: 133 - protein, 9 aa, synthetic construct
MQATQFPLT

SEQ ID NO: 134 - protein, 5 aa, synthetic construct
SYAMN

SEQ ID NO: 135 - protein, 17 aa, synthetic construct
GISGNGGRIYYAESVKG

SEQ ID NO: 136 - protein, 4 aa, synthetic construct
DLDV

SEQ ID NO: 137 - protein, 16 aa, synthetic construct
RSSQSLVHSIGNTYLN

SEQ ID NO: 138 - protein, 7 aa, synthetic construct
KISNRFS

SEQ ID NO: 139 - protein, 9 aa, synthetic construct
MQATQFPLT

SEQ ID NO: 140 - protein, 5 aa, synthetic construct
SYAMN

SEQ ID NO: 141 - protein, 17 aa, synthetic construct
GISGNGGRIYYAESVKG

SEQ ID NO: 142 - protein, 4 aa, synthetic construct
DLDV

SEQ ID NO: 143 - protein, 16 aa, synthetic construct
RSSQSLVHSEGNTYLN

SEQ ID NO: 144 - protein, 7 aa, synthetic construct
KISNRFS

SEQ ID NO: 145 - protein, 9 aa, synthetic construct
MQATQFPLT

SEQ ID NO: 146 - protein, 5 aa, synthetic construct
SYAMN

SEQ ID NO: 147 - protein, 17 aa, synthetic construct
GISGNGGRIYYAESVKG

SEQ ID NO: 148 - protein, 4 aa, synthetic construct
DLDV

SEQ ID NO: 149 - protein, 16 aa, synthetic construct
RSSQSLVHSDGNTYLA

SEQ ID NO: 150 - protein, 7 aa, synthetic construct
KISNRFS

SEQ ID NO: 151 - protein, 9 aa, synthetic construct
MQATQFPLT

SEQ ID NO: 152 - protein, 5 aa, synthetic construct
SYAMN

SEQ ID NO: 153 - protein, 17 aa, synthetic construct
GISGNGGRIYYAESVKG

SEQ ID NO: 154 - protein, 4 aa, synthetic construct
DLDV

SEQ ID NO: 155 - protein, 16 aa, synthetic construct
RSSQSLVHSDGNTYLN

SEQ ID NO: 156 - protein, 7 aa, synthetic construct
KISNRFS

SEQ ID NO: 157 - protein, 9 aa, synthetic construct
MQATQFPLT

SEQ ID NO: 158 - protein, 5 aa, synthetic construct
SYAMN

SEQ ID NO: 159 - protein, 17 aa, synthetic construct
GISGNGGRIYYAESVKG

SEQ ID NO: 160 - protein, 4 aa, synthetic construct
DLDV

SEQ ID NO: 161 - protein, 16 aa, synthetic construct
RSSQSLVHSDGNTYLN

SEQ ID NO: 162 - protein, 7 aa, synthetic construct
KISNRFS

SEQ ID NO: 163 - protein, 9 aa, synthetic construct
MQATQFPLT

SEQ ID NO: 164 - protein, 5 aa, synthetic construct
SYAMN

SEQ ID NO: 165 - protein, 17 aa, synthetic construct
GISGNGGRIYYAESVKG

SEQ ID NO: 166 - protein, 4 aa, synthetic construct
DLDV

SEQ ID NO: 167 - protein, 16 aa, synthetic construct
RSSQSLVHSDGNTYLN

SEQ ID NO: 168 - protein, 7 aa, synthetic construct
KISNRFS

SEQ ID NO: 169 - protein, 9 aa, synthetic construct
MQATQFPLT

SEQ ID NO: 170 - protein, 5 aa, synthetic construct
SYAMN

SEQ ID NO: 171 - protein, 17 aa, synthetic construct
GISGNGGRIYYAESVKG

SEQ ID NO: 172 - protein, 4 aa, synthetic construct
DLDV

SEQ ID NO: 173 - protein, 16 aa, synthetic construct
RSSQSLVHSDGNTYLN

SEQ ID NO: 174 - protein, 7 aa, synthetic construct
KASNRFS

SEQ ID NO: 175 - protein, 9 aa, synthetic construct
MQATQFPLT

SEQ ID NO: 176 - protein, 5 aa, synthetic construct
SYAMN

SEQ ID NO: 177 - protein, 17 aa, synthetic construct
GISGNGGRIYYAESVKG

SEQ ID NO: 178 - protein, 4 aa, synthetic construct
DLDV

SEQ ID NO: 179 - protein, 16 aa, synthetic construct
RSSQSLVHSDGNTYLN

SEQ ID NO: 180 - protein, 7 aa, synthetic construct
KISNRFS

SEQ ID NO: 181 - protein, 9 aa, synthetic construct
MQATQFPLT

SEQ ID NO: 182 - protein, 5 aa, synthetic construct
SYAMN

SEQ ID NO: 183 - protein, 17 aa, synthetic construct
GISGNGGRIYYAESVKG

SEQ ID NO: 184 - protein, 4 aa, synthetic construct
DLDV

SEQ ID NO: 185 - protein, 16 aa, synthetic construct
RSSQSLVHSDGNTYLN

SEQ ID NO: 186 - protein, 7 aa, synthetic construct
KISNRFS

SEQ ID NO: 187 - protein, 9 aa, synthetic construct
MQATQFPLT

SEQ ID NO: 188 - protein, 5 aa, synthetic construct
SYAMN

SEQ ID NO: 189 - protein, 17 aa, synthetic construct
GISGNGGRIYYAESVKG

SEQ ID NO: 190 - protein, 4 aa, synthetic construct
DLDV

SEQ ID NO: 191 - protein, 16 aa, synthetic construct
RSSQSLVHSDGNTYLN

SEQ ID NO: 192 - protein, 7 aa, synthetic construct
KISNRFS

SEQ ID NO: 193 - protein, 9 aa, synthetic construct
MQATQFPLT

SEQ ID NO: 194 - protein, 5 aa, synthetic construct
SYAMN

SEQ ID NO: 195 - protein, 17 aa, synthetic construct
GISGNGGRIYYAESVKG

SEQ ID NO: 196 - protein, 4 aa, synthetic construct
DLDV

SEQ ID NO: 197 - protein, 16 aa, synthetic construct
RSSQSLVHSDGNTYLN

SEQ ID NO: 198 - protein, 7 aa, synthetic construct
KISNRFS

SEQ ID NO: 199 - protein, 9 aa, synthetic construct
MQATQFPLT

SEQ ID NO: 200 - protein, 5 aa, synthetic construct
SYAMN

SEQ ID NO: 201 - protein, 17 aa, synthetic construct
GISGNGGRIYYAESVKG

SEQ ID NO: 202 - protein, 4 aa, synthetic construct
DLDV

SEQ ID NO: 203 - protein, 16 aa, synthetic construct
RSSQSLVHSDGNTYLN

SEQ ID NO: 204 - protein, 7 aa, synthetic construct
KISNRFS

SEQ ID NO: 205 - protein, 9 aa, synthetic construct
MQATQFPLT

SEQ ID NO: 206 - protein, 5 aa, synthetic construct
SYAMN

SEQ ID NO: 207 - protein, 17 aa, synthetic construct
GISGNGGRIYYAESVKG

SEQ ID NO: 208 - protein, 4 aa, synthetic construct
DLDV

SEQ ID NO: 209 - protein, 16 aa, synthetic construct
RSSQSLVHSDGNTYLN

SEQ ID NO: 210 - protein, 7 aa, synthetic construct
KISNRFS

SEQ ID NO: 211 - protein, 9 aa, synthetic construct
MQATQFPLT

SEQ ID NO: 212 - protein, 5 aa, synthetic construct
SYAMN

SEQ ID NO: 213 - protein, 17 aa, synthetic construct
GISGNGGRIYYAESVKG

SEQ ID NO: 214 - protein, 4 aa, synthetic construct
DLDV

SEQ ID NO: 215 - protein, 16 aa, synthetic construct
RSSQSLVHSDGNTYLN

SEQ ID NO: 216 - protein, 7 aa, synthetic construct
KISNRFS

SEQ ID NO: 217 - protein, 9 aa, synthetic construct
MQATQFPLT

SEQ ID NO: 218 - protein, 5 aa, synthetic construct
SYAMN

SEQ ID NO: 219 - protein, 17 aa, synthetic construct
GISGNGGRIYYAESVKG

SEQ ID NO: 220 - protein, 4 aa, synthetic construct
DLDV

SEQ ID NO: 221 - protein, 16 aa, synthetic construct
RSSQSLVHSDGNTYLN

SEQ ID NO: 222 - protein, 7 aa, synthetic construct
KISNRFS

SEQ ID NO: 223 - protein, 9 aa, synthetic construct
MQATQFPLT

SEQ ID NO: 224 - protein, 5 aa, synthetic construct
SYAMN

SEQ ID NO: 225 - protein, 17 aa, synthetic construct
GISGNAGRIYYAESVKG

SEQ ID NO: 226 - protein, 4 aa, synthetic construct
DLDV

SEQ ID NO: 227 - protein, 16 aa, synthetic construct
RSSQSLVHSDGNTYLN

SEQ ID NO: 228 - protein, 7 aa, synthetic construct
KISNRFS

SEQ ID NO: 229 - protein, 9 aa, synthetic construct
MQATQFPLT

SEQ ID NO: 230 - protein, 5 aa, synthetic construct
SYAMN

SEQ ID NO: 231 - protein, 17 aa, synthetic construct
GISGNGGRIYYAESVKG

SEQ ID NO: 232 - protein, 4 aa, synthetic construct
DLDV

SEQ ID NO: 233 - protein, 16 aa, synthetic construct
RSSQSLVHSDGNTYLN

SEQ ID NO: 234 - protein, 7 aa, synthetic construct
RISNRFS

SEQ ID NO: 235 - protein, 9 aa, synthetic construct
MQATQFPLT

SEQ ID NO: 236 - protein, 5 aa, synthetic construct
SYAMN

SEQ ID NO: 237 - protein, 17 aa, synthetic construct
GISGNGGRIYYAESVKG

SEQ ID NO: 238 - protein, 4 aa, synthetic construct
DLDV

SEQ ID NO: 239 - protein, 16 aa, synthetic construct
RSSQSLVHSDGNTYLN

SEQ ID NO: 240 - protein, 7 aa, synthetic construct
KASNRFS

SEQ ID NO: 241 - protein, 9 aa, synthetic construct
MQATQFPLT

SEQ ID NO: 242 - protein, 5 aa, synthetic construct
SYAMN

SEQ ID NO: 243 - protein, 17 aa, synthetic construct
GISGNGGRIYYAESVKG

SEQ ID NO: 244 - protein, 4 aa, synthetic construct
DLDV

SEQ ID NO: 245 - protein, 16 aa, synthetic construct
RSSQSLVHSDGNTYLN

SEQ ID NO: 246 - protein, 7 aa, synthetic construct
KNSNRFS

SEQ ID NO: 247 - protein, 9 aa, synthetic construct
MQATQFPLT

SEQ ID NO: 248 - protein, 5 aa, synthetic construct
SYAMN

SEQ ID NO: 249 - protein, 17 aa, synthetic construct
GISGNGGRIYYAESVKG

SEQ ID NO: 250 - protein, 4 aa, synthetic construct
DLDV

SEQ ID NO: 251 - protein, 16 aa, synthetic construct
RSSQSLVHSDGNTYLN

SEQ ID NO: 252 - protein, 7 aa, synthetic construct
KTSNRFS

SEQ ID NO: 253 - protein, 9 aa, synthetic construct
MQATQFPLT

SEQ ID NO: 254 - protein, 5 aa, synthetic construct
SYAMN

SEQ ID NO: 255 - protein, 17 aa, synthetic construct
GISGNGGRIYYAESVKG

SEQ ID NO: 256 - protein, 4 aa, synthetic construct
DLDV

SEQ ID NO: 257 - protein, 16 aa, synthetic construct
RSSQSLVHSDGNTYLN

SEQ ID NO: 258 - protein, 7 aa, synthetic construct
KVSNRFS

SEQ ID NO: 259 - protein, 9 aa, synthetic construct
MQATQFPLT

SEQ ID NO: 260 - protein, 5 aa, synthetic construct
SYAMN

SEQ ID NO: 261 - protein, 17 aa, synthetic construct
GISGNGGRIYYAESVKG

SEQ ID NO: 262 - protein, 4 aa, synthetic construct
DLDV

SEQ ID NO: 263 - protein, 16 aa, synthetic construct
RSSQSLVHSDGNTYLN

SEQ ID NO: 264 - protein, 7 aa, synthetic construct
KISNLFS

SEQ ID NO: 265 - protein, 9 aa, synthetic construct
MQATQFPLT

SEQ ID NO: 266 - protein, 5 aa, synthetic construct
SYAMN

SEQ ID NO: 267 - protein, 17 aa, synthetic construct
GISGNGGRIYYAESVKG

SEQ ID NO: 268 - protein, 4 aa, synthetic construct
DLDV

SEQ ID NO: 269 - protein, 16 aa, synthetic construct
RSSQSLVHSDGNTYLN

SEQ ID NO: 270 - protein, 7 aa, synthetic construct
KISNDFS

SEQ ID NO: 271 - protein, 9 aa, synthetic construct
MQATQFPLT

SEQ ID NO: 272 - protein, 5 aa, synthetic construct
SYAMN

SEQ ID NO: 273 - protein, 17 aa, synthetic construct
GISGNGGRIYYAESVKG

SEQ ID NO: 274 - protein, 4 aa, synthetic construct
DLDV

SEQ ID NO: 275 - protein, 16 aa, synthetic construct
RSSQSLVHSDGNTYLN

SEQ ID NO: 276 - protein, 7 aa, synthetic construct
KISNEFS

SEQ ID NO: 277 - protein, 9 aa, synthetic construct
MQATQFPLT

SEQ ID NO: 278 - protein, 5 aa, synthetic construct
SYAMN

SEQ ID NO: 279 - protein, 17 aa, synthetic construct
GISGNGGRIYYAESVKG

SEQ ID NO: 280 - protein, 4 aa, synthetic construct
DLDV

SEQ ID NO: 281 - protein, 16 aa, synthetic construct
RSSQSLVHSDGNTYLN

SEQ ID NO: 282 - protein, 7 aa, synthetic construct
KISNSFS

SEQ ID NO: 283 - protein, 9 aa, synthetic construct
MQATQFPLT

SEQ ID NO: 284 - protein, 5 aa, synthetic construct
SYAMN

SEQ ID NO: 285 - protein, 17 aa, synthetic construct
GISGNGGRIYYAESVKG

SEQ ID NO: 286 - protein, 4 aa, synthetic construct
DLDV

SEQ ID NO: 287 - protein, 16 aa, synthetic construct
RSSQSLVHSDGNTYLN

SEQ ID NO: 288 - protein, 7 aa, synthetic construct
KISNPFS

SEQ ID NO: 289 - protein, 9 aa, synthetic construct
MQATQFPLT

SEQ ID NO: 290 - protein, 5 aa, synthetic construct
SYAMN

SEQ ID NO: 291 - protein, 17 aa, synthetic construct
GISGNGGRIYYAESVKG

SEQ ID NO: 292 - protein, 4 aa, synthetic construct
DLDV

SEQ ID NO: 293 - protein, 16 aa, synthetic construct
RSSQSLVHSDGNTYLN

SEQ ID NO: 294 - protein, 7 aa, synthetic construct
KISNRPS

SEQ ID NO: 295 - protein, 9 aa, synthetic construct
MQATQFPLT

SEQ ID NO: 296 - protein, 5 aa, synthetic construct
SYAMN

SEQ ID NO: 297 - protein, 17 aa, synthetic construct
GISGNGGRIYYAESVKG

SEQ ID NO: 298 - protein, 4 aa, synthetic construct
DLDV

SEQ ID NO: 299 - protein, 16 aa, synthetic construct
RSSQSLVHSDGNTYLN

SEQ ID NO: 300 - protein, 7 aa, synthetic construct
KISNRAS

SEQ ID NO: 301 - protein, 9 aa, synthetic construct
MQATQFPLT

SEQ ID NO: 302 - protein, 5 aa, synthetic construct
SYAMN

SEQ ID NO: 303 - protein, 17 aa, synthetic construct
GISGNGGRIYYAESVKG

SEQ ID NO: 304 - protein, 4 aa, synthetic construct
DLDV

SEQ ID NO: 305 - protein, 16 aa, synthetic construct
RSSQSLVHSDGNTYLN

SEQ ID NO: 306 - protein, 7 aa, synthetic construct
KISNRGS

SEQ ID NO: 307 - protein, 9 aa, synthetic construct
MQATQFPLT

SEQ ID NO: 308 - protein, 5 aa, synthetic construct
SYAMN

SEQ ID NO: 309 - protein, 17 aa, synthetic construct
GISGNGGRIYYAESVKG

SEQ ID NO: 310 - protein, 4 aa, synthetic construct
DLDV

SEQ ID NO: 311 - protein, 16 aa, synthetic construct
RSSQSLVHSDGNTYLN

SEQ ID NO: 312 - protein, 7 aa, synthetic construct
KISNRSS

SEQ ID NO: 313 - protein, 9 aa, synthetic construct
MQATQFPLT

SEQ ID NO: 314 - protein, 5 aa, synthetic construct
SYAMN

SEQ ID NO: 315 - protein, 17 aa, synthetic construct
GISGNGGRIYYAESVKG

SEQ ID NO: 316 - protein, 4 aa, synthetic construct
DLDV

SEQ ID NO: 317 - protein, 16 aa, synthetic construct
RSSQSLVHSDGNTYLN

SEQ ID NO: 318 - protein, 7 aa, synthetic construct
KISNRNS

SEQ ID NO: 319 - protein, 9 aa, synthetic construct
MQATQFPLT

SEQ ID NO: 320 - protein, 5 aa, synthetic construct
SYAMN

SEQ ID NO: 321 - protein, 17 aa, synthetic construct
GISGNGGRIYYAESVKG

SEQ ID NO: 322 - protein, 4 aa, synthetic construct
DLDV

SEQ ID NO: 323 - protein, 16 aa, synthetic construct
RSSQSLVHSDGNTYLN

SEQ ID NO: 324 - protein, 7 aa, synthetic construct
KISNRQS

SEQ ID NO: 325 - protein, 9 aa, synthetic construct
MQATQFPLT

SEQ ID NO: 326 - protein, 5 aa, synthetic construct
SYAMN

SEQ ID NO: 327 - protein, 17 aa, synthetic construct
GISGNGGRIYYAESVKG

SEQ ID NO: 328 - protein, 4 aa, synthetic construct
DLDV

SEQ ID NO: 329 - protein, 16 aa, synthetic construct
RSSQSLVHSDGNTYLN

SEQ ID NO: 330 - protein, 7 aa, synthetic construct
KISNRES

SEQ ID NO: 331 - protein, 9 aa, synthetic construct
MQATQFPLT

SEQ ID NO: 332 - protein, 5 aa, synthetic construct
SYAMN

SEQ ID NO: 333 - protein, 17 aa, synthetic construct
GISGNGGRIYYAESVKG

SEQ ID NO: 334 - protein, 4 aa, synthetic construct
DLDV

SEQ ID NO: 335 - protein, 16 aa, synthetic construct
RSSQSLVHSDGNTYLN

SEQ ID NO: 336 - protein, 7 aa, synthetic construct
KISNRDS

SEQ ID NO: 337 - protein, 9 aa, synthetic construct
MQATQFPLT

SEQ ID NO: 338 - protein, 5 aa, synthetic construct
SYAMN

SEQ ID NO: 339 - protein, 17 aa, synthetic construct
GISGNGGRIYYAESVKG

SEQ ID NO: 340 - protein, 4 aa, synthetic construct
DLDV

SEQ ID NO: 341 - protein, 16 aa, synthetic construct
RSSQSLVHSDGNTYLN

SEQ ID NO: 342 - protein, 7 aa, synthetic construct
KISNRFP

SEQ ID NO: 343 - protein, 9 aa, synthetic construct
MQATQFPLT

SEQ ID NO: 344 - protein, 5 aa, synthetic construct
SYAMN

SEQ ID NO: 345 - protein, 17 aa, synthetic construct
GISGNGGRIYYAESVKG

SEQ ID NO: 346 - protein, 4 aa, synthetic construct
DLDV

SEQ ID NO: 347 - protein, 16 aa, synthetic construct
RSSQSLVHSDGNTYLN

SEQ ID NO: 348 - protein, 7 aa, synthetic construct
KISNRFS

SEQ ID NO: 349 - protein, 9 aa, synthetic construct
MQATQFPLT

SEQ ID NO: 350 - protein, 5 aa, synthetic construct
SYAMN

SEQ ID NO: 351 - protein, 17 aa, synthetic construct
GISGNGGRIYYAESVKG

SEQ ID NO: 352 - protein, 4 aa, synthetic construct
DLDV

SEQ ID NO: 353 - protein, 16 aa, synthetic construct
RSSQSLVHSDGNTYLN

SEQ ID NO: 354 - protein, 7 aa, synthetic construct
KISNRFS

SEQ ID NO: 355 - protein, 9 aa, synthetic construct
NQATQFPLT

SEQ ID NO: 356 - protein, 5 aa, synthetic construct
SYAMN

SEQ ID NO: 357 - protein, 17 aa, synthetic construct
GISGNGGRIYYAESVKG

SEQ ID NO: 358 - protein, 4 aa, synthetic construct
DLDV

SEQ ID NO: 359 - protein, 16 aa, synthetic construct
RSSQSLVHSDGNTYLN

SEQ ID NO: 360 - protein, 7 aa, synthetic construct
KISNRFS

SEQ ID NO: 361 - protein, 9 aa, synthetic construct
WQATQFPLT

SEQ ID NO: 362 - protein, 5 aa, synthetic construct
SYAMN

SEQ ID NO: 363 - protein, 17 aa, synthetic construct
GISGNGGRIYYAESVKG

SEQ ID NO: 364 - protein, 4 aa, synthetic construct
DLDV

SEQ ID NO: 365 - protein, 16 aa, synthetic construct
RSSQSLVHSDGNTYLN

SEQ ID NO: 366 - protein, 7 aa, synthetic construct
KISNRFS

SEQ ID NO: 367 - protein, 9 aa, synthetic construct
MQGTQFPLT

SEQ ID NO: 368 - protein, 5 aa, synthetic construct
SYAMN

SEQ ID NO: 369 - protein, 17 aa, synthetic construct
GISGNGGRIYYAESVKG

SEQ ID NO: 370 - protein, 4 aa, synthetic construct
DLDV

SEQ ID NO: 371 - protein, 16 aa, synthetic construct
RSSQSLVHSDGNTYLN

SEQ ID NO: 372 - protein, 7 aa, synthetic construct
KISNRFS

SEQ ID NO: 373 - protein, 9 aa, synthetic construct
MQNTQFPLT

SEQ ID NO: 374 - protein, 5 aa, synthetic construct
SYAMN

SEQ ID NO: 375 - protein, 17 aa, synthetic construct
GISGNGGRIYYAESVKG

SEQ ID NO: 376 - protein, 4 aa, synthetic construct
DLDV

SEQ ID NO: 377 - protein, 16 aa, synthetic construct
RSSQSLVHSDGNTYLN

SEQ ID NO: 378 - protein, 7 aa, synthetic construct
KISNRFS

SEQ ID NO: 379 - protein, 9 aa, synthetic construct
MQATQSPLT

SEQ ID NO: 380 - protein, 5 aa, synthetic construct
SYAMN

SEQ ID NO: 381 - protein, 17 aa, synthetic construct
GISGNGGRIYYAESVKG

SEQ ID NO: 382 - protein, 4 aa, synthetic construct
DLDV

SEQ ID NO: 383 - protein, 16 aa, synthetic construct
RSSQSLVHSDGNTYLN

SEQ ID NO: 384 - protein, 7 aa, synthetic construct
KISNRFS

SEQ ID NO: 385 - protein, 9 aa, synthetic construct
MQATQTPLT

SEQ ID NO: 386 - protein, 5 aa, synthetic construct
SYAMN

SEQ ID NO: 387 - protein, 17 aa, synthetic construct
GISGNGGRIYYAESVKG

SEQ ID NO: 388 - protein, 4 aa, synthetic construct
DLDV

SEQ ID NO: 389 - protein, 16 aa, synthetic construct
RSSQSLVHSDGNTYLN

SEQ ID NO: 390 - protein, 7 aa, synthetic construct
KISNRFS

SEQ ID NO: 391 - protein, 9 aa, synthetic construct
MQATQYPLT

SEQ ID NO: 392 - protein, 5 aa, synthetic construct
SYAMN

SEQ ID NO: 393 - protein, 17 aa, synthetic construct
GISGNGGRIYYAESVKG

SEQ ID NO: 394 - protein, 4 aa, synthetic construct
DLDV

SEQ ID NO: 395 - protein, 16 aa, synthetic construct
RSSQSLVHSDGNTYLN

SEQ ID NO: 396 - protein, 7 aa, synthetic construct
KISNRFS

SEQ ID NO: 397 - protein, 9 aa, synthetic construct
MQATQNPLT

SEQ ID NO: 398 - protein, 5 aa, synthetic construct
SYAMN

SEQ ID NO: 399 - protein, 17 aa, synthetic construct
GISGNGGRIYYAESVKG

SEQ ID NO: 400 - protein, 4 aa, synthetic construct
DLDV

SEQ ID NO: 401 - protein, 16 aa, synthetic construct
RSSQSLVHSDGNTYLN

SEQ ID NO: 402 - protein, 7 aa, synthetic construct
KISNRFS

SEQ ID NO: 403 - protein, 9 aa, synthetic construct
MQATQLPLT

SEQ ID NO: 404 - protein, 5 aa, synthetic construct
SYAMN

SEQ ID NO: 405 - protein, 17 aa, synthetic construct
GISGNGGRIYYAESVKG

SEQ ID NO: 406 - protein, 4 aa, synthetic construct
DLDV

SEQ ID NO: 407 - protein, 16 aa, synthetic construct
RSSQSLVHSDGNTYLN

SEQ ID NO: 408 - protein, 7 aa, synthetic construct
KISNRFS

SEQ ID NO: 409 - protein, 9 aa, synthetic construct
MQATQAPLT

SEQ ID NO: 410 - protein, 5 aa, synthetic construct
SYAMN

SEQ ID NO: 411 - protein, 17 aa, synthetic construct
GISGNGGRIYYAESVKG

SEQ ID NO: 412 - protein, 4 aa, synthetic construct
DLDV

SEQ ID NO: 413 - protein, 16 aa, synthetic construct
RSSQSLVHSDGNTYLN

SEQ ID NO: 414 - protein, 7 aa, synthetic construct
KISNRFS

SEQ ID NO: 415 - protein, 9 aa, synthetic construct
MQATQFNLT

SEQ ID NO: 416 - protein, 5 aa, synthetic construct
SYAMN

SEQ ID NO: 417 - protein, 17 aa, synthetic construct
GISGNGGRIYYAESVKG

SEQ ID NO: 418 - protein, 4 aa, synthetic construct
DLDV

SEQ ID NO: 419 - protein, 16 aa, synthetic construct
RSSQSLVHSDGNTYLN

SEQ ID NO: 420 - protein, 7 aa, synthetic construct
KISNRFS

SEQ ID NO: 421 - protein, 9 aa, synthetic construct
MQATQFQLT

SEQ ID NO: 422 - protein, 5 aa, synthetic construct
SYAMN

SEQ ID NO: 423 - protein, 17 aa, synthetic construct
GISGNGGRIYYAESVKG

SEQ ID NO: 424 - protein, 4 aa, synthetic construct
DLDV

SEQ ID NO: 425 - protein, 16 aa, synthetic construct
RSSQSLVHSDGNTYLN

SEQ ID NO: 426 - protein, 7 aa, synthetic construct
KISNRFS

SEQ ID NO: 427 - protein, 9 aa, synthetic construct
MQATQFDLT

SEQ ID NO: 428 - protein, 5 aa, synthetic construct
SYAMN

SEQ ID NO: 429 - protein, 17 aa, synthetic construct
GISGNGGRIYYAESVKG

SEQ ID NO: 430 - protein, 4 aa, synthetic construct
DLDV

SEQ ID NO: 431 - protein, 16 aa, synthetic construct
RSSQSLVHSDGNTYLN

SEQ ID NO: 432 - protein, 7 aa, synthetic construct
KISNRFS

SEQ ID NO: 433 - protein, 9 aa, synthetic construct
MQATQFSLT

SEQ ID NO: 434 - protein, 5 aa, synthetic construct
SYAMN

SEQ ID NO: 435 - protein, 17 aa, synthetic construct
GISGNGGRIYYAESVKG

SEQ ID NO: 436 - protein, 4 aa, synthetic construct
DLDV

SEQ ID NO: 437 - protein, 16 aa, synthetic construct
RSSQSLVHSDGNTYLN

SEQ ID NO: 438 - protein, 7 aa, synthetic construct
KISNRFS

SEQ ID NO: 439 - protein, 9 aa, synthetic construct
MQATQFPST

SEQ ID NO: 440 - protein, 5 aa, synthetic construct
SYAMN

SEQ ID NO: 441 - protein, 17 aa, synthetic construct
GISGNGGRIYYAESVKG

SEQ ID NO: 442 - protein, 4 aa, synthetic construct
DLDV

SEQ ID NO: 443 - protein, 16 aa, synthetic construct
RSSQSLVHSDGNTYLN

SEQ ID NO: 444 - protein, 7 aa, synthetic construct
KISNRFS

SEQ ID NO: 445 - protein, 9 aa, synthetic construct
MQATQFPGT

SEQ ID NO: 446 - protein, 5 aa, synthetic construct
SYAMN

SEQ ID NO: 447 - protein, 17 aa, synthetic construct
GISGNGGRIYYAESVKG

SEQ ID NO: 448 - protein, 4 aa, synthetic construct
DLDV

SEQ ID NO: 449 - protein, 16 aa, synthetic construct
RSSQSLVHSDGNTYLN

SEQ ID NO: 450 - protein, 7 aa, synthetic construct
KISNRFS

SEQ ID NO: 451 - protein, 9 aa, synthetic construct
MQATQFPYT

SEQ ID NO: 452 - protein, 5 aa, synthetic construct
SYAMN

SEQ ID NO: 453 - protein, 17 aa, synthetic construct
GISGNGGRIYYAESVKG

SEQ ID NO: 454 - protein, 4 aa, synthetic construct
DLDV

SEQ ID NO: 455 - protein, 16 aa, synthetic construct
RSSQSLVHSDGNTYLN

SEQ ID NO: 456 - protein, 7 aa, synthetic construct
KISNRFS

SEQ ID NO: 457 - protein, 9 aa, synthetic construct
MQATQFPWT

SEQ ID NO: 458 - protein, 5 aa, synthetic construct
SYAMN

SEQ ID NO: 459 - protein, 17 aa, synthetic construct
GISGNGGRIYYAESVKG

SEQ ID NO: 460 - protein, 4 aa, synthetic construct
DLDV

SEQ ID NO: 461 - protein, 16 aa, synthetic construct
RSSQSLVHSDGNTYLN

SEQ ID NO: 462 - protein, 7 aa, synthetic construct
KISNRFS

SEQ ID NO: 463 - protein, 9 aa, synthetic construct
MQATQFSLP

SEQ ID NO: 464 - protein, 5 aa, synthetic construct
SYAMN

SEQ ID NO: 465 - protein, 17 aa, synthetic construct
GISGSGGRIYYAESVKG

SEQ ID NO: 466 - protein, 4 aa, synthetic construct
DLDV

SEQ ID NO: 467 - protein, 16 aa, synthetic construct
RSSQSLVHSDGNTYLN

SEQ ID NO: 468 - protein, 7 aa, synthetic construct
KISNRFS

SEQ ID NO: 469 - protein, 9 aa, synthetic construct
MQATQFPLT

SEQ ID NO: 470 - protein, 5 aa, synthetic construct
SYAMN

SEQ ID NO: 471 - protein, 17 aa, synthetic construct
GISGNGGRIYYAESVKG

SEQ ID NO: 472 - protein, 4 aa, synthetic construct
DLDV

SEQ ID NO: 473 - protein, 16 aa, synthetic construct
RSSQSLVHSDGNTYLN

SEQ ID NO: 474 - protein, 7 aa, synthetic construct
KISNRFS

SEQ ID NO: 475 - protein, 9 aa, synthetic construct
MQATQFPLT

SEQ ID NO: 476 - protein, 5 aa, synthetic construct
SYAMN

SEQ ID NO: 477 - protein, 17 aa, synthetic construct
GISGSGGRIYYAESVKG

SEQ ID NO: 478 - protein, 4 aa, synthetic construct
DLDV

SEQ ID NO: 479 - protein, 16 aa, synthetic construct
RSSQSLVHSDGNTYLN

SEQ ID NO: 480 - protein, 7 aa, synthetic construct
KISNRFS

SEQ ID NO: 481 - protein, 9 aa, synthetic construct
MQATQFPLT

SEQ ID NO: 482 - protein, 5 aa, synthetic construct
SYAMN

SEQ ID NO: 483 - protein, 17 aa, synthetic construct
GISGNGGRIYYAESVKG

SEQ ID NO: 484 - protein, 4 aa, synthetic construct
DLDV

SEQ ID NO: 485 - protein, 16 aa, synthetic construct
RSSQSLVHSDANTYLN

SEQ ID NO: 486 - protein, 7 aa, synthetic construct
KISNRFS

SEQ ID NO: 487 - protein, 9 aa, synthetic construct
MQATQFPLT

SEQ ID NO: 488 - protein, 5 aa, synthetic construct
SYAMN

SEQ ID NO: 489 - protein, 17 aa, synthetic construct
GISGSGGRIYYAESVKG

SEQ ID NO: 490 - protein, 4 aa, synthetic construct
DLDV

SEQ ID NO: 491 - protein, 16 aa, synthetic construct
RSSQSLVHSDANTYLN

SEQ ID NO: 492 - protein, 7 aa, synthetic construct
KISNRFS

SEQ ID NO: 493 - protein, 9 aa, synthetic construct
MQATQFPLT

SEQ ID NO: 494 - protein, 5 aa, synthetic construct
SYAMN

SEQ ID NO: 495 - protein, 17 aa, synthetic construct
GISGNGGRIYYAESVKG

SEQ ID NO: 496 - protein, 4 aa, synthetic construct
DLDV

SEQ ID NO: 497 - protein, 16 aa, synthetic construct
RSSQSLVHSDANTYLN

SEQ ID NO: 498 - protein, 7 aa, synthetic construct
KISNRFS

SEQ ID NO: 499 - protein, 9 aa, synthetic construct
MQATQFPLT

SEQ ID NO: 500 - protein, 5 aa, synthetic construct
SYAMN

SEQ ID NO: 501 - protein, 17 aa, synthetic construct
GISGSGGRIYYAESVKG

SEQ ID NO: 502 - protein, 4 aa, synthetic construct
DLDV

SEQ ID NO: 503 - protein, 16 aa, synthetic construct
RSSQSLVHSDANTYLN

SEQ ID NO: 504 - protein, 7 aa, synthetic construct
KISNRFS

SEQ ID NO: 505 - protein, 9 aa, synthetic construct
MQATQFPLT

SEQ ID NO: 506 - protein, 5 aa, synthetic construct
SYAMN

SEQ ID NO: 507 - protein, 17 aa, synthetic construct
GISGNGGRIYYAESVKG

SEQ ID NO: 508 - protein, 4 aa, synthetic construct
DLDV

SEQ ID NO: 509 - protein, 16 aa, synthetic construct
RSSQSLVHSDANTYLN

SEQ ID NO: 510 - protein, 7 aa, synthetic construct
KISNRFS

SEQ ID NO: 511 - protein, 9 aa, synthetic construct
MQATQFPLT

SEQ ID NO: 512 - protein, 5 aa, synthetic construct
SYAMN

SEQ ID NO: 513 - protein, 17 aa, synthetic construct
GISGSGGRIYYAESVKG

SEQ ID NO: 514 - protein, 4 aa, synthetic construct
DLDV

SEQ ID NO: 515 - protein, 16 aa, synthetic construct
RSSQSLVHSDANTYLN

SEQ ID NO: 516 - protein, 7 aa, synthetic construct
KISNRFS

SEQ ID NO: 517 - protein, 9 aa, synthetic construct
MQATQFPLT

SEQ ID NO: 518 - protein, 5 aa, synthetic construct
SYAMN

SEQ ID NO: 519 - protein, 17 aa, synthetic construct
GISGNGGRIYYAESVKG

SEQ ID NO: 520 - protein, 4 aa, synthetic construct
DLDV

SEQ ID NO: 521 - protein, 16 aa, synthetic construct
RSSQSLVHSDANTYLN

SEQ ID NO: 522 - protein, 7 aa, synthetic construct
KISNRFS

SEQ ID NO: 523 - protein, 9 aa, synthetic construct
MQATQFPLT

SEQ ID NO: 524 - protein, 5 aa, synthetic construct
SYAMN

SEQ ID NO: 525 - protein, 17 aa, synthetic construct
GISGNGGRIYYAESVKG

SEQ ID NO: 526 - protein, 4 aa, synthetic construct
DLDV

SEQ ID NO: 527 - protein, 16 aa, synthetic construct
RSSQSLVHSDANTYLN

SEQ ID NO: 528 - protein, 7 aa, synthetic construct
KISNRFS

SEQ ID NO: 529 - protein, 9 aa, synthetic construct
MQATQFPLT

SEQ ID NO: 530 - protein, 5 aa, synthetic construct
SYAMN

SEQ ID NO: 531 - protein, 17 aa, synthetic construct
GISGSGGRIYYAESVKG

SEQ ID NO: 532 - protein, 4 aa, synthetic construct
DLDV

SEQ ID NO: 533 - protein, 16 aa, synthetic construct
RSSQSLVHSDANTYLN

SEQ ID NO: 534 - protein, 7 aa, synthetic construct
KISNRFS

SEQ ID NO: 535 - protein, 9 aa, synthetic construct
MQATQFPLT

SEQ ID NO: 536 - protein, 5 aa, synthetic construct
SYAMN

SEQ ID NO: 537 - protein, 17 aa, synthetic construct
GISGNGGRIYYAESVKG

SEQ ID NO: 538 - protein, 4 aa, synthetic construct
DLDV

SEQ ID NO: 539 - protein, 16 aa, synthetic construct
RSSQSLVHSDANTYLN

SEQ ID NO: 540 - protein, 7 aa, synthetic construct
KISNRFS

SEQ ID NO: 541 - protein, 9 aa, synthetic construct
MQATQFPLT

SEQ ID NO: 542 - protein, 5 aa, synthetic construct
SYAMN

SEQ ID NO: 543 - protein, 17 aa, synthetic construct
GISGSGGRIYYAESVKG

SEQ ID NO: 544 - protein, 4 aa, synthetic construct
DLDV

SEQ ID NO: 545 - protein, 16 aa, synthetic construct
RSSQSLVHSDANTYLN

SEQ ID NO: 546 - protein, 7 aa, synthetic construct
KISNRFS

SEQ ID NO: 547 - protein, 9 aa, synthetic construct
MQATQFPLT

SEQ ID NO: 548 - protein, 5 aa, synthetic construct
SYAMN

SEQ ID NO: 549 - protein, 17 aa, synthetic construct
GISGNGGRIYYAESVKG

SEQ ID NO: 550 - protein, 4 aa, synthetic construct
DLDV

SEQ ID NO: 551 - protein, 16 aa, synthetic construct
RSSQSLVHSDANTYLN

SEQ ID NO: 552 - protein, 7 aa, synthetic construct
KISNRFS

SEQ ID NO: 553 - protein, 9 aa, synthetic construct
MQATQFPLT

SEQ ID NO: 554 - protein, 5 aa, synthetic construct
SYAMN

SEQ ID NO: 555 - protein, 17 aa, synthetic construct
GISGSGGRIYYAESVKG

SEQ ID NO: 556 - protein, 4 aa, synthetic construct
DLDV

SEQ ID NO: 557 - protein, 16 aa, synthetic construct
RSSQSLVHSDANTYLN

SEQ ID NO: 558 - protein, 7 aa, synthetic construct
KISNRFS

SEQ ID NO: 559 - protein, 9 aa, synthetic construct
MQATQFPLT

SEQ ID NO: 560 - protein, 5 aa, synthetic construct
SYAMN

SEQ ID NO: 561 - protein, 17 aa, synthetic construct
GISGNGGRIYYAESVKG

SEQ ID NO: 562 - protein, 4 aa, synthetic construct
DLDV

SEQ ID NO: 563 - protein, 16 aa, synthetic construct
RSSQSLVHSDANTYLN

SEQ ID NO: 564 - protein, 7 aa, synthetic construct
KISNRFS

SEQ ID NO: 565 - protein, 9 aa, synthetic construct
MQATQFPLT

SEQ ID NO: 566 - protein, 5 aa, synthetic construct
SYAMN

SEQ ID NO: 567 - protein, 17 aa, synthetic construct
GISGNGGRIYYAESVKG

SEQ ID NO: 568 - protein, 4 aa, synthetic construct
DLDV

SEQ ID NO: 569 - protein, 16 aa, synthetic construct
RSSQSLVHSDANTYLN

SEQ ID NO: 570 - protein, 7 aa, synthetic construct
KISNRFS

SEQ ID NO: 571 - protein, 9 aa, synthetic construct
MQATQFPLT

SEQ ID NO: 572 - protein, 5 aa, synthetic construct
SYAMN

SEQ ID NO: 573 - protein, 17 aa, synthetic construct
GISGSGGRIYYAESVKG

SEQ ID NO: 574 - protein, 4 aa, synthetic construct
DLDV

SEQ ID NO: 575 - protein, 16 aa, synthetic construct
RSSQSLVHSDANTYLN

SEQ ID NO: 576 - protein, 7 aa, synthetic construct
KISNRFS

SEQ ID NO: 577 - protein, 9 aa, synthetic construct
MQATQFPLT

SEQ ID NO: 578 - protein, 5 aa, synthetic construct
SYAMN

SEQ ID NO: 579 - protein, 17 aa, synthetic construct
GISGNGGRIYYAESVKG

SEQ ID NO: 580 - protein, 4 aa, synthetic construct
DLDV

SEQ ID NO: 581 - protein, 16 aa, synthetic construct
RSSQSLVHSDANTYLN

SEQ ID NO: 582 - protein, 7 aa, synthetic construct
KISNRFS

SEQ ID NO: 583 - protein, 9 aa, synthetic construct
MQATQFPLT

SEQ ID NO: 584 - protein, 5 aa, synthetic construct
SYAMN

SEQ ID NO: 585 - protein, 17 aa, synthetic construct
GISGSGGRIYYAESVKG

SEQ ID NO: 586 - protein, 4 aa, synthetic construct
DLDV

SEQ ID NO: 587 - protein, 16 aa, synthetic construct
RSSQSLVHSDANTYLN

SEQ ID NO: 588 - protein, 7 aa, synthetic construct
KISNRFS

SEQ ID NO: 589 - protein, 9 aa, synthetic construct
MQATQFPLT

SEQ ID NO: 590 - protein, 5 aa, synthetic construct
SYAMN

SEQ ID NO: 591 - protein, 17 aa, synthetic construct
GISGNGGRIYYAESVKG

SEQ ID NO: 592 - protein, 4 aa, synthetic construct
DLDV

SEQ ID NO: 593 - protein, 16 aa, synthetic construct
RSSQSLVHSDANTYLN

SEQ ID NO: 594 - protein, 7 aa, synthetic construct
KISNRFS

SEQ ID NO: 595 - protein, 9 aa, synthetic construct
MQATQFPLT

SEQ ID NO: 596 - protein, 5 aa, synthetic construct
SYAMN

SEQ ID NO: 597 - protein, 17 aa, synthetic construct
GISGSGGRIYYAESVKG

SEQ ID NO: 598 - protein, 4 aa, synthetic construct
DLDV

SEQ ID NO: 599 - protein, 16 aa, synthetic construct
RSSQSLVHSDANTYLN

SEQ ID NO: 600 - protein, 7 aa, synthetic construct
KISNRFS

SEQ ID NO: 601 - protein, 9 aa, synthetic construct
MQATQFPLT

SEQ ID NO: 602 - protein, 5 aa, synthetic construct
SYAMS

SEQ ID NO: 603 - protein, 17 aa, synthetic construct
GISGSGGRIYYAESVKG

SEQ ID NO: 604 - protein, 4 aa, synthetic construct
DLDV

SEQ ID NO: 605 - protein, 16 aa, synthetic construct
RSSQSLVHSDGNTYLN

SEQ ID NO: 606 - protein, 7 aa, synthetic construct
KISNRFS

SEQ ID NO: 607 - protein, 9 aa, synthetic construct
MQATQFPLT

SEQ ID NO: 608 - protein, 5 aa, synthetic construct
SYAMH

SEQ ID NO: 609 - protein, 17 aa, synthetic construct
GISGSGGRIYYAESVKG

SEQ ID NO: 610 - protein, 4 aa, synthetic construct
DLDV

SEQ ID NO: 611 - protein, 16 aa, synthetic construct
RSSQSLVHSDGNTYLN

SEQ ID NO: 612 - protein, 7 aa, synthetic construct
KISNRFS

SEQ ID NO: 613 - protein, 9 aa, synthetic construct
MQATQFPLT

SEQ ID NO: 614 - protein, 5 aa, synthetic construct
SYAMT

SEQ ID NO: 615 - protein, 17 aa, synthetic construct
GISGSGGRIYYAESVKG

SEQ ID NO: 616 - protein, 4 aa, synthetic construct
DLDV

SEQ ID NO: 617 - protein, 16 aa, synthetic construct
RSSQSLVHSDGNTYLN

SEQ ID NO: 618 - protein, 7 aa, synthetic construct
KISNRFS

SEQ ID NO: 619 - protein, 9 aa, synthetic construct
MQATQFPLT

SEQ ID NO: 620 - protein, 5 aa, synthetic construct
SYAMN

SEQ ID NO: 621 - protein, 17 aa, synthetic construct
GISGSGGRIYYAESVKG

SEQ ID NO: 622 - protein, 4 aa, synthetic construct
DLDV

SEQ ID NO: 623 - protein, 16 aa, synthetic construct
RSSQSLVHSDGNTYLN

SEQ ID NO: 624 - protein, 7 aa, synthetic construct
KISNRFS

SEQ ID NO: 625 - protein, 9 aa, synthetic construct
MQATQFPLT

SEQ ID NO: 626 - protein, 5 aa, synthetic construct
SYAMN

SEQ ID NO: 627 - protein, 17 aa, synthetic construct
GISGSGGRIYYAESVKG

SEQ ID NO: 628 - protein, 4 aa, synthetic construct
DLDV

SEQ ID NO: 629 - protein, 16 aa, synthetic construct
RSSQSLVHSDGNTYLN

SEQ ID NO: 630 - protein, 7 aa, synthetic construct
KISNRFS

SEQ ID NO: 631 - protein, 9 aa, synthetic construct
MQATQFPLT

SEQ ID NO: 632 - protein, 5 aa, synthetic construct
SYAMN

SEQ ID NO: 633 - protein, 17 aa, synthetic construct
GISGSGGRIYYAESVKG

SEQ ID NO: 634 - protein, 4 aa, synthetic construct
DLDV

SEQ ID NO: 635 - protein, 16 aa, synthetic construct
RSSQSLVHSDGNTYLN

SEQ ID NO: 636 - protein, 7 aa, synthetic construct
KISNRFS

SEQ ID NO: 637 - protein, 9 aa, synthetic construct
MQATQFPLT

SEQ ID NO: 638 - protein, 5 aa, synthetic construct
SYAMN

SEQ ID NO: 639 - protein, 17 aa, synthetic construct
GISGSGGRIYKAESVKG

SEQ ID NO: 640 - protein, 4 aa, synthetic construct
DLDV

SEQ ID NO: 641 - protein, 16 aa, synthetic construct
RSSQSLVHSDGNTYLN

SEQ ID NO: 642 - protein, 7 aa, synthetic construct
KISNRFS

SEQ ID NO: 643 - protein, 9 aa, synthetic construct
MQATQFPLT

SEQ ID NO: 644 - protein, 5 aa, synthetic construct
SYAMN

SEQ ID NO: 645 - protein, 17 aa, synthetic construct
GISGSGGRIYYAESVKG

SEQ ID NO: 646 - protein, 4 aa, synthetic construct
DLDV

SEQ ID NO: 647 - protein, 16 aa, synthetic construct
RSSQSLVHSDGNTYLN

SEQ ID NO: 648 - protein, 7 aa, synthetic construct
KISNRFS

SEQ ID NO: 649 - protein, 9 aa, synthetic construct
MQATQFPLT

SEQ ID NO: 650 - protein, 5 aa, synthetic construct
SYAMN

SEQ ID NO: 651 - protein, 17 aa, synthetic construct
GISGSGGRIYYAESVKG

SEQ ID NO: 652 - protein, 4 aa, synthetic construct
DLDV

SEQ ID NO: 653 - protein, 16 aa, synthetic construct
RSSQSLVHSDGNTYLN

SEQ ID NO: 654 - protein, 7 aa, synthetic construct
KISNRFS

SEQ ID NO: 655 - protein, 9 aa, synthetic construct
MQATQFPLT

SEQ ID NO: 656 - protein, 5 aa, synthetic construct
SYAMN

SEQ ID NO: 657 - protein, 17 aa, synthetic construct
GISGSGGRIYYAESVKG

SEQ ID NO: 658 - protein, 4 aa, synthetic construct
DLDV

SEQ ID NO: 659 - protein, 16 aa, synthetic construct
RSSQSLVHSDGNTYLN

SEQ ID NO: 660 - protein, 7 aa, synthetic construct
KISNRFS

SEQ ID NO: 661 - protein, 9 aa, synthetic construct
MQATQFPLT

SEQ ID NO: 662 - protein, 5 aa, synthetic construct
SYAMN

SEQ ID NO: 663 - protein, 17 aa, synthetic construct
GISGSGGRIYYAESVKG

SEQ ID NO: 664 - protein, 4 aa, synthetic construct
DLDV

SEQ ID NO: 665 - protein, 16 aa, synthetic construct
RSSQSLVHSDGNTYLN

SEQ ID NO: 666 - protein, 7 aa, synthetic construct
KISNRFS

SEQ ID NO: 667 - protein, 9 aa, synthetic construct
MQATQFPLT

SEQ ID NO: 668 - protein, 5 aa, synthetic construct
SYAMN

SEQ ID NO: 669 - protein, 17 aa, synthetic construct
GISGSGGRIYYAESVKG

SEQ ID NO: 670 - protein, 4 aa, synthetic construct
DLDV

SEQ ID NO: 671 - protein, 16 aa, synthetic construct
RSSQSLVHSDGNTYLN

SEQ ID NO: 672 - protein, 7 aa, synthetic construct
KISNRFS

SEQ ID NO: 673 - protein, 9 aa, synthetic construct
MQATQFPLT

SEQ ID NO: 674 - protein, 5 aa, synthetic construct
SYAMN

SEQ ID NO: 675 - protein, 17 aa, synthetic construct
GISGSGGRIYYAESVKG

SEQ ID NO: 676 - protein, 4 aa, synthetic construct
DLDV

SEQ ID NO: 677 - protein, 16 aa, synthetic construct
RSSQSLVHSDGNTYLN

SEQ ID NO: 678 - protein, 7 aa, synthetic construct
KISNRFS

SEQ ID NO: 679 - protein, 9 aa, synthetic construct
MQATQFPLT

SEQ ID NO: 680 - protein, 5 aa, synthetic construct
SYAMN

SEQ ID NO: 681 - protein, 17 aa, synthetic construct
GISGSGGRIYYAESVKG

SEQ ID NO: 682 - protein, 4 aa, synthetic construct
DLDV

SEQ ID NO: 683 - protein, 16 aa, synthetic construct
RSSQSLVHSDGNTYLN

SEQ ID NO: 684 - protein, 7 aa, synthetic construct
KISNRFS

SEQ ID NO: 685 - protein, 9 aa, synthetic construct
MQATQFPLT

SEQ ID NO: 686 - protein, 5 aa, synthetic construct
SYAMN

SEQ ID NO: 687 - protein, 17 aa, synthetic construct
GISGSGGRIYYAESVKG

SEQ ID NO: 688 - protein, 4 aa, synthetic construct
DLDV

SEQ ID NO: 689 - protein, 16 aa, synthetic construct
RSSQSLVHSDGNTYLN

SEQ ID NO: 690 - protein, 7 aa, synthetic construct
KISNRFS

SEQ ID NO: 691 - protein, 9 aa, synthetic construct
MQATQFPLT

SEQ ID NO: 692 - protein, 5 aa, synthetic construct
DYAMN

SEQ ID NO: 693 - protein, 17 aa, synthetic construct
GISGSGGRIYYAESVKG

SEQ ID NO: 694 - protein, 4 aa, synthetic construct
DLDV

SEQ ID NO: 695 - protein, 16 aa, synthetic construct
RSSQSLVHSDGNTYLN

SEQ ID NO: 696 - protein, 7 aa, synthetic construct
KISNRFS

SEQ ID NO: 697 - protein, 9 aa, synthetic construct
MQATQFPLT

SEQ ID NO: 698 - protein, 5 aa, synthetic construct
SYAMN

SEQ ID NO: 699 - protein, 17 aa, synthetic construct
GISGSGGAIYYAESVKG

SEQ ID NO: 700 - protein, 4 aa, synthetic construct
DLDV

SEQ ID NO: 701 - protein, 16 aa, synthetic construct
RSSQSLVHSDGNTYLN

SEQ ID NO: 702 - protein, 7 aa, synthetic construct
KISNRFS

SEQ ID NO: 703 - protein, 9 aa, synthetic construct
MQATQFPLT

SEQ ID NO: 704 - protein, 5 aa, synthetic construct
SYAMN

SEQ ID NO: 705 - protein, 17 aa, synthetic construct
GISGSGGRAYYAESVKG

SEQ ID NO: 706 - protein, 4 aa, synthetic construct
DLDV

SEQ ID NO: 707 - protein, 16 aa, synthetic construct
RSSQSLVHSDGNTYLN

SEQ ID NO: 708 - protein, 7 aa, synthetic construct
KISNRFS

SEQ ID NO: 709 - protein, 9 aa, synthetic construct
MQATQFPLT

SEQ ID NO: 710 - protein, 5 aa, synthetic construct
SYAMN

SEQ ID NO: 711 - protein, 17 aa, synthetic construct
GISGSGGSTYYAESVKG

SEQ ID NO: 712 - protein, 4 aa, synthetic construct
DLDV

SEQ ID NO: 713 - protein, 16 aa, synthetic construct
RSSQSLVHSDGNTYLN

SEQ ID NO: 714 - protein, 7 aa, synthetic construct
KISNRFS

SEQ ID NO: 715 - protein, 9 aa, synthetic construct
MQATQFPLT

SEQ ID NO: 716 - protein, 5 aa, synthetic construct
SYAMN

SEQ ID NO: 717 - protein, 17 aa, synthetic construct
GISGSGGRIFYAESVKG

SEQ ID NO: 718 - protein, 4 aa, synthetic construct
DLDV

SEQ ID NO: 719 - protein, 16 aa, synthetic construct
RSSQSLVHSDGNTYLN

SEQ ID NO: 720 - protein, 7 aa, synthetic construct
KISNRFS

SEQ ID NO: 721 - protein, 9 aa, synthetic construct
MQATQFPLT

SEQ ID NO: 722 - protein, 5 aa, synthetic construct
SYAMN

SEQ ID NO: 723 - protein, 17 aa, synthetic construct
GISGSGGRIHYAESVKG

SEQ ID NO: 724 - protein, 4 aa, synthetic construct
DLDV

SEQ ID NO: 725 - protein, 16 aa, synthetic construct
RSSQSLVHSDGNTYLN

SEQ ID NO: 726 - protein, 7 aa, synthetic construct
KISNRFS

SEQ ID NO: 727 - protein, 9 aa, synthetic construct
MQATQFPLT

SEQ ID NO: 728 - protein, 5 aa, synthetic construct
SYAMN

SEQ ID NO: 729 - protein, 17 aa, synthetic construct
GISGSGGRINYAESVKG

SEQ ID NO: 730 - protein, 4 aa, synthetic construct
DLDV

SEQ ID NO: 731 - protein, 16 aa, synthetic construct
RSSQSLVHSDGNTYLN

SEQ ID NO: 732 - protein, 7 aa, synthetic construct
KISNRFS

SEQ ID NO: 733 - protein, 9 aa, synthetic construct
MQATQFPLT

SEQ ID NO: 734 - protein, 5 aa, synthetic construct
SYAMN

SEQ ID NO: 735 - protein, 17 aa, synthetic construct
GISGSGGRIKYAESVKG

SEQ ID NO: 736 - protein, 4 aa, synthetic construct
DLDV

SEQ ID NO: 737 - protein, 16 aa, synthetic construct
RSSQSLVHSDGNTYLN

SEQ ID NO: 738 - protein, 7 aa, synthetic construct
KISNRFS

SEQ ID NO: 739 - protein, 9 aa, synthetic construct
MQATQFPLT

SEQ ID NO: 740 - protein, 5 aa, synthetic construct
SYAMN

SEQ ID NO: 741 - protein, 17 aa, synthetic construct
GISGSGGRIDYAESVKG

SEQ ID NO: 742 - protein, 4 aa, synthetic construct
DLDV

SEQ ID NO: 743 - protein, 16 aa, synthetic construct
RSSQSLVHSDGNTYLN

SEQ ID NO: 744 - protein, 7 aa, synthetic construct
KISNRFS

SEQ ID NO: 745 - protein, 9 aa, synthetic construct
MQATQFPLT

SEQ ID NO: 746 - protein, 5 aa, synthetic construct
SYAMN

SEQ ID NO: 747 - protein, 17 aa, synthetic construct
GISGSGGRIAYAESVKG

SEQ ID NO: 748 - protein, 4 aa, synthetic construct
DLDV

SEQ ID NO: 749 - protein, 16 aa, synthetic construct
RSSQSLVHSDGNTYLN

SEQ ID NO: 750 - protein, 7 aa, synthetic construct
KISNRFS

SEQ ID NO: 751 - protein, 9 aa, synthetic construct
MQATQFPLT

SEQ ID NO: 752 - protein, 5 aa, synthetic construct
SYAMN

SEQ ID NO: 753 - protein, 17 aa, synthetic construct
GISGSGGRIYFAESVKG

SEQ ID NO: 754 - protein, 4 aa, synthetic construct
DLDV

SEQ ID NO: 755 - protein, 16 aa, synthetic construct
RSSQSLVHSDGNTYLN

SEQ ID NO: 756 - protein, 7 aa, synthetic construct
KISNRFS

SEQ ID NO: 757 - protein, 9 aa, synthetic construct
MQATQFPLT

SEQ ID NO: 758 - protein, 5 aa, synthetic construct
SYAMN

SEQ ID NO: 759 - protein, 17 aa, synthetic construct
GISGSGGRIYHAESVKG

SEQ ID NO: 760 - protein, 4 aa, synthetic construct
DLDV

SEQ ID NO: 761 - protein, 16 aa, synthetic construct
RSSQSLVHSDGNTYLN

SEQ ID NO: 762 - protein, 7 aa, synthetic construct
KISNRFS

SEQ ID NO: 763 - protein, 9 aa, synthetic construct
MQATQFPLT

SEQ ID NO: 764 - protein, 5 aa, synthetic construct
SYAMN

SEQ ID NO: 765 - protein, 17 aa, synthetic construct
GISGSGGRIYPAESVKG

SEQ ID NO: 766 - protein, 4 aa, synthetic construct
DLDV

SEQ ID NO: 767 - protein, 16 aa, synthetic construct
RSSQSLVHSDGNTYLN

SEQ ID NO: 768 - protein, 7 aa, synthetic construct
KISNRFS

SEQ ID NO: 769 - protein, 9 aa, synthetic construct
MQATQFPLT

SEQ ID NO: 770 - protein, 5 aa, synthetic construct
SYAMN

SEQ ID NO: 771 - protein, 17 aa, synthetic construct
GISGSGGRIYAAESVKG

SEQ ID NO: 772 - protein, 4 aa, synthetic construct
DLDV

SEQ ID NO: 773 - protein, 16 aa, synthetic construct
RSSQSLVHSDGNTYLN

SEQ ID NO: 774 - protein, 7 aa, synthetic construct
KISNRFS

SEQ ID NO: 775 - protein, 9 aa, synthetic construct
MQATQFPLT

SEQ ID NO: 776 - protein, 5 aa, synthetic construct
SYAMN

SEQ ID NO: 777 - protein, 17 aa, synthetic construct
GISGSGGRIYYAESVKG

SEQ ID NO: 778 - protein, 4 aa, synthetic construct
DLDV

SEQ ID NO: 779 - protein, 16 aa, synthetic construct
RSSQSLVHSDGNTYLN

SEQ ID NO: 780 - protein, 7 aa, synthetic construct
KISNRFS

SEQ ID NO: 781 - protein, 9 aa, synthetic construct
MQATQFPLT

SEQ ID NO: 782 - protein, 5 aa, synthetic construct
SYAMN

SEQ ID NO: 783 - protein, 17 aa, synthetic construct
GISGSGGRIYYAESVKG

SEQ ID NO: 784 - protein, 4 aa, synthetic construct
DLDV

SEQ ID NO: 785 - protein, 16 aa, synthetic construct
RSSQSLVHSDGNTYLN

SEQ ID NO: 786 - protein, 7 aa, synthetic construct
KISNRFS

SEQ ID NO: 787 - protein, 9 aa, synthetic construct
MQATQFPLT

SEQ ID NO: 788 - protein, 5 aa, synthetic construct
SYAMN

SEQ ID NO: 789 - protein, 17 aa, synthetic construct
GISGSGGRIYSAESVKG

SEQ ID NO: 790 - protein, 4 aa, synthetic construct
DLDV

SEQ ID NO: 791 - protein, 16 aa, synthetic construct
RSSQSLVHSDGNTYLN

SEQ ID NO: 792 - protein, 7 aa, synthetic construct
KISNRFS

SEQ ID NO: 793 - protein, 9 aa, synthetic construct
MQATQFPLT

SEQ ID NO: 794 - protein, 5 aa, synthetic construct
SYAMN

SEQ ID NO: 795 - protein, 17 aa, synthetic construct
GISGNGGRIYYAESVKG

SEQ ID NO: 796 - protein, 4 aa, synthetic construct
DLDV

SEQ ID NO: 797 - protein, 16 aa, synthetic construct
RSSQSLVHSDGNTYLN

SEQ ID NO: 798 - protein, 7 aa, synthetic construct
KISNRFD

SEQ ID NO: 799 - protein, 9 aa, synthetic construct
MQATQFPLT

SEQ ID NO: 800 - protein, 5 aa, synthetic construct
SYAMN

SEQ ID NO: 801 - protein, 17 aa, synthetic construct
GISGNGGRIYYAESVKG

SEQ ID NO: 802 - protein, 4 aa, synthetic construct
DLDV

SEQ ID NO: 803 - protein, 16 aa, synthetic construct
RSSQSLVHSDGNTYLN

SEQ ID NO: 804 - protein, 7 aa, synthetic construct
KISNRFE

SEQ ID NO: 805 - protein, 9 aa, synthetic construct
MQATQFPLT

SEQ ID NO: 806 - protein, 5 aa, synthetic construct
SYAMN

SEQ ID NO: 807 - protein, 17 aa, synthetic construct
GISGNGGRIYYAESVKG

SEQ ID NO: 808 - protein, 4 aa, synthetic construct
DLDV

SEQ ID NO: 809 - protein, 16 aa, synthetic construct
RSSQSLVHSDGNTYLN

SEQ ID NO: 810 - protein, 7 aa, synthetic construct
KISNRFQ

SEQ ID NO: 811 - protein, 9 aa, synthetic construct
MQATQFPLT

SEQ ID NO: 812 - protein, 5 aa, synthetic construct
SYAMN

SEQ ID NO: 813 - protein, 17 aa, synthetic construct
GISGNGGRIYYAESVKG

SEQ ID NO: 814 - protein, 4 aa, synthetic construct
DLDV

SEQ ID NO: 815 - protein, 16 aa, synthetic construct
RSSQSLVHSDGNTYLN

SEQ ID NO: 816 - protein, 7 aa, synthetic construct
KISNRFS

SEQ ID NO: 817 - protein, 9 aa, synthetic construct
MQATQFPLT

SEQ ID NO: 818 - protein, 5 aa, synthetic construct
SYAMN

SEQ ID NO: 819 - protein, 17 aa, synthetic construct
GISGNGGRIYYAESVKG

SEQ ID NO: 820 - protein, 4 aa, synthetic construct
DLDV

SEQ ID NO: 821 - protein, 16 aa, synthetic construct
RSSQSLVHSDGNTYLN

SEQ ID NO: 822 - protein, 7 aa, synthetic construct
KISNRFS

SEQ ID NO: 823 - protein, 9 aa, synthetic construct
MQATQFPLT

SEQ ID NO: 824 - protein, 5 aa, synthetic construct
SYAMN

SEQ ID NO: 825 - protein, 17 aa, synthetic construct
GISGNGGRIYYAESVKG

SEQ ID NO: 826 - protein, 4 aa, synthetic construct
DLDV

SEQ ID NO: 827 - protein, 16 aa, synthetic construct
RSSQSLVHSDGNTYLN

SEQ ID NO: 828 - protein, 7 aa, synthetic construct
KISNRFS

SEQ ID NO: 829 - protein, 9 aa, synthetic construct
MQATQFPLT

SEQ ID NO: 830 - protein, 5 aa, synthetic construct
SYAMN

SEQ ID NO: 831 - protein, 17 aa, synthetic construct
GISGNGGRIYYAESVKG

SEQ ID NO: 832 - protein, 4 aa, synthetic construct
DLDV

SEQ ID NO: 833 - protein, 16 aa, synthetic construct
RSSQSLVHSDGNTYLN

SEQ ID NO: 834 - protein, 7 aa, synthetic construct
KISNRFS

SEQ ID NO: 835 - protein, 9 aa, synthetic construct
MQATQFPLT

SEQ ID NO: 836 - protein, 5 aa, synthetic construct
SYAMN

SEQ ID NO: 837 - protein, 17 aa, synthetic construct
GISGNGGRIYYAESVKG

SEQ ID NO: 838 - protein, 4 aa, synthetic construct
DLDV

SEQ ID NO: 839 - protein, 16 aa, synthetic construct
RSSQSLVHSDGNTYLN

SEQ ID NO: 840 - protein, 7 aa, synthetic construct
KISNRFS

SEQ ID NO: 841 - protein, 9 aa, synthetic construct
MQATQFPLT

SEQ ID NO: 842 - protein, 5 aa, synthetic construct
SYAMN

SEQ ID NO: 843 - protein, 17 aa, synthetic construct
GISGNGGRIYYAESVKG

SEQ ID NO: 844 - protein, 4 aa, synthetic construct
DLDV

SEQ ID NO: 845 - protein, 16 aa, synthetic construct
RSSQSLVHSDGNTYLN

SEQ ID NO: 846 - protein, 7 aa, synthetic construct
KISNRFS

SEQ ID NO: 847 - protein, 9 aa, synthetic construct
MQATQFPLT

SEQ ID NO: 848 - protein, 5 aa, synthetic construct
SYAMN

SEQ ID NO: 849 - protein, 17 aa, synthetic construct
GISGNGGRIYYAESVKG

SEQ ID NO: 850 - protein, 4 aa, synthetic construct
DLDV

SEQ ID NO: 851 - protein, 16 aa, synthetic construct
RSSQSLVHSDGNTYLN

SEQ ID NO: 852 - protein, 7 aa, synthetic construct
KIDNRFS

SEQ ID NO: 853 - protein, 9 aa, synthetic construct
MQATQFPLT

SEQ ID NO: 854 - protein, 5 aa, synthetic construct
SYAMN

SEQ ID NO: 855 - protein, 17 aa, synthetic construct
GISGNGGRIYYAESVKG

SEQ ID NO: 856 - protein, 4 aa, synthetic construct
DLDV

SEQ ID NO: 857 - protein, 16 aa, synthetic construct
RSSQSLVHSDGNTYLN

SEQ ID NO: 858 - protein, 7 aa, synthetic construct
KIDNRFS

SEQ ID NO: 859 - protein, 9 aa, synthetic construct
MQATQFPLT

SEQ ID NO: 860 - protein, 5 aa, synthetic construct
SYAMN

SEQ ID NO: 861 - protein, 17 aa, synthetic construct
GISGSGGRAYYAESVKG

SEQ ID NO: 862 - protein, 4 aa, synthetic construct
DLDV

SEQ ID NO: 863 - protein, 16 aa, synthetic construct
RSSQSLVHSDANTYLN

SEQ ID NO: 864 - protein, 7 aa, synthetic construct
KISNRFS

SEQ ID NO: 865 - protein, 9 aa, synthetic construct
MQATQFPLT

SEQ ID NO: 866 - protein, 5 aa, synthetic construct
SYAMN

SEQ ID NO: 867 - protein, 17 aa, synthetic construct
GISGSGGRIYYAESVKG

SEQ ID NO: 868 - protein, 4 aa, synthetic construct
DLDV

SEQ ID NO: 869 - protein, 16 aa, synthetic construct
RSSQSLVHSDANTYLN

SEQ ID NO: 870 - protein, 7 aa, synthetic construct
KISNRFS

SEQ ID NO: 871 - protein, 9 aa, synthetic construct
MQATQFPLT

SEQ ID NO: 872 - protein, 5 aa, synthetic construct
DYAMN

SEQ ID NO: 873 - protein, 17 aa, synthetic construct
GISGSGGRIYYAESVKG

SEQ ID NO: 874 - protein, 4 aa, synthetic construct
DLDV

SEQ ID NO: 875 - protein, 16 aa, synthetic construct
RSSQSLVHSDANTYLN

SEQ ID NO: 876 - protein, 7 aa, synthetic construct
KISNRFS

SEQ ID NO: 877 - protein, 9 aa, synthetic construct
MQATQFPLT

SEQ ID NO: 878 - protein, 5 aa, synthetic construct
SYAMN

SEQ ID NO: 879 - protein, 17 aa, synthetic construct
GISGSGGRAYYAESVKG

SEQ ID NO: 880 - protein, 4 aa, synthetic construct
DLDV

SEQ ID NO: 881 - protein, 16 aa, synthetic construct
RSSQSLVHSDANTYLN

SEQ ID NO: 882 - protein, 7 aa, synthetic construct
KISNRFS

SEQ ID NO: 883 - protein, 9 aa, synthetic construct
MQATQFPLT

SEQ ID NO: 884 - protein, 5 aa, synthetic construct
DYAMN

SEQ ID NO: 885 - protein, 17 aa, synthetic construct
GISGSGGRAYYAESVKG

SEQ ID NO: 886 - protein, 4 aa, synthetic construct
DLDV

SEQ ID NO: 887 - protein, 16 aa, synthetic construct
RSSQSLVHSDANTYLN

SEQ ID NO: 888 - protein, 7 aa, synthetic construct
KISNRFS

SEQ ID NO: 889 - protein, 9 aa, synthetic construct
MQATQFPLT

SEQ ID NO: 890 - protein, 5 aa, synthetic construct
DYAMN

SEQ ID NO: 891 - protein, 17 aa, synthetic construct
GISGSGGRIYYAESVKG

SEQ ID NO: 892 - protein, 4 aa, synthetic construct
DLDV

SEQ ID NO: 893 - protein, 16 aa, synthetic construct
RSSQSLVHSDANTYLN

SEQ ID NO: 894 - protein, 7 aa, synthetic construct
KISNRFS

SEQ ID NO: 895 - protein, 9 aa, synthetic construct
MQATQFPLT

SEQ ID NO: 896 - protein, 5 aa, synthetic construct
DYAMN

SEQ ID NO: 897 - protein, 17 aa, synthetic construct
GISGSGGRAYYAESVKG

SEQ ID NO: 898 - protein, 4 aa, synthetic construct
DLDV

SEQ ID NO: 899 - protein, 16 aa, synthetic construct
RSSQSLVHSDANTYLN

SEQ ID NO: 900 - protein, 7 aa, synthetic construct
KISNRFS

SEQ ID NO: 901 - protein, 9 aa, synthetic construct
MQATQFPLT

SEQ ID NO: 902 - protein, 5 aa, synthetic construct
SYAMN

SEQ ID NO: 903 - protein, 17 aa, synthetic construct
GISGSGGRIYYAESVKG

SEQ ID NO: 904 - protein, 4 aa, synthetic construct
DLDV

SEQ ID NO: 905 - protein, 16 aa, synthetic construct
RSSQSLVHSDANTYLN

SEQ ID NO: 906 - protein, 7 aa, synthetic construct
KISNRFS

SEQ ID NO: 907 - protein, 9 aa, synthetic construct
MQATQFPLT

SEQ ID NO: 908 - protein, 5 aa, synthetic construct
SYAMN

SEQ ID NO: 909 - protein, 17 aa, synthetic construct
GISGSGGRIYYAESVKG

SEQ ID NO: 910 - protein, 4 aa, synthetic construct
DLDV

SEQ ID NO: 911 - protein, 16 aa, synthetic construct
RSSQSLVHSDANTYLN

SEQ ID NO: 912 - protein, 7 aa, synthetic construct
KISNRFS

SEQ ID NO: 913 - protein, 9 aa, synthetic construct
MQATQFPLT

SEQ ID NO: 914 - protein, 5 aa, synthetic construct
SYAMN

SEQ ID NO: 915 - protein, 17 aa, synthetic construct
GISGSGGRIYYAESVKG

SEQ ID NO: 916 - protein, 4 aa, synthetic construct
DLDV

SEQ ID NO: 917 - protein, 16 aa, synthetic construct
RSSQSLVHSDGNTYLN

SEQ ID NO: 918 - protein, 7 aa, synthetic construct
KISNRFS

SEQ ID NO: 919 - protein, 9 aa, synthetic construct
MQATQFPLT

SEQ ID NO: 920 - protein, 5 aa, synthetic construct
SYGMH

SEQ ID NO: 921 - protein, 17 aa, synthetic construct
VIWYDGSNKDYADSVKG

SEQ ID NO: 922 - protein, 6 aa, synthetic construct
PGEGDY

SEQ ID NO: 923 - protein, 11 aa, synthetic construct
RASQGVRNDFG

SEQ ID NO: 924 - protein, 7 aa, synthetic construct
GASSLQS

SEQ ID NO: 925 - protein, 9 aa, synthetic construct
LQQNSYPWT

SEQ ID NO: 926 - protein, 5 aa, synthetic construct
SYGMH

SEQ ID NO: 927 - protein, 17 aa, synthetic construct
VIWYDASNKDYADSVKG

SEQ ID NO: 928 - protein, 6 aa, synthetic construct
PGEGDY

SEQ ID NO: 929 - protein, 11 aa, synthetic construct
RASQGVRNDFG

SEQ ID NO: 930 - protein, 7 aa, synthetic construct
GASSLQS

SEQ ID NO: 931 - protein, 9 aa, synthetic construct
LQQNSYPWT

SEQ ID NO: 932 - protein, 5 aa, synthetic construct
SYGMH

SEQ ID NO: 933 - protein, 17 aa, synthetic construct
VIWYDPSNKDYADSVKG

SEQ ID NO: 934 - protein, 6 aa, synthetic construct
PGEGDY

SEQ ID NO: 935 - protein, 11 aa, synthetic construct
RASQGVRNDFG

SEQ ID NO: 936 - protein, 7 aa, synthetic construct
GASSLQS

SEQ ID NO: 937 - protein, 9 aa, synthetic construct
LQQNSYPWT

SEQ ID NO: 938 - protein, 5 aa, synthetic construct
SYGMH

SEQ ID NO: 939 - protein, 17 aa, synthetic construct
VIWYEGSNKDYADSVKG

SEQ ID NO: 940 - protein, 6 aa, synthetic construct
PGEGDY

SEQ ID NO: 941 - protein, 11 aa, synthetic construct
RASQGVRNDFG

SEQ ID NO: 942 - protein, 7 aa, synthetic construct
GASSLQS

SEQ ID NO: 943 - protein, 9 aa, synthetic construct
LQQNSYPWT

SEQ ID NO: 944 - protein, 5 aa, synthetic construct
SYGMH

SEQ ID NO: 945 - protein, 17 aa, synthetic construct
VIWYSGSNKDYADSVKG

SEQ ID NO: 946 - protein, 6 aa, synthetic construct
PGEGDY

SEQ ID NO: 947 - protein, 11 aa, synthetic construct
RASQGVRNDFG

SEQ ID NO: 948 - protein, 7 aa, synthetic construct
GASSLQS

SEQ ID NO: 949 - protein, 9 aa, synthetic construct
LQQNSYPWT

SEQ ID NO: 950 - protein, 5 aa, synthetic construct
SYGMH

SEQ ID NO: 951 - protein, 17 aa, synthetic construct
VIWYDGSNKDYAPSVKG

SEQ ID NO: 952 - protein, 6 aa, synthetic construct
PGEGDY

SEQ ID NO: 953 - protein, 11 aa, synthetic construct
RASQGVRNDFG

SEQ ID NO: 954 - protein, 7 aa, synthetic construct
GASSLQS

SEQ ID NO: 955 - protein, 9 aa, synthetic construct
LQQNSYPWT

SEQ ID NO: 956 - protein, 5 aa, synthetic construct
SYGMH

SEQ ID NO: 957 - protein, 17 aa, synthetic construct
VIWYDGSNKDYAQSVKG

SEQ ID NO: 958 - protein, 6 aa, synthetic construct
PGEGDY

SEQ ID NO: 959 - protein, 11 aa, synthetic construct
RASQGVRNDFG

SEQ ID NO: 960 - protein, 7 aa, synthetic construct
GASSLQS

SEQ ID NO: 961 - protein, 9 aa, synthetic construct
LQQNSYPWT

SEQ ID NO: 962 - protein, 5 aa, synthetic construct
SYGMH

SEQ ID NO: 963 - protein, 17 aa, synthetic construct
VIWYDGSNKDYAESVKG

SEQ ID NO: 964 - protein, 6 aa, synthetic construct
PGEGDY

SEQ ID NO: 965 - protein, 11 aa, synthetic construct
RASQGVRNDFG

SEQ ID NO: 966 - protein, 7 aa, synthetic construct
GASSLQS

SEQ ID NO: 967 - protein, 9 aa, synthetic construct
LQQNSYPWT

SEQ ID NO: 968 - protein, 5 aa, synthetic construct
SYGMH

SEQ ID NO: 969 - protein, 17 aa, synthetic construct
VIWYDGSNKDYADAVKG

SEQ ID NO: 970 - protein, 6 aa, synthetic construct
PGEGDY

SEQ ID NO: 971 - protein, 11 aa, synthetic construct
RASQGVRNDFG

SEQ ID NO: 972 - protein, 7 aa, synthetic construct
GASSLQS

SEQ ID NO: 973 - protein, 9 aa, synthetic construct
LQQNSYPWT

SEQ ID NO: 974 - protein, 5 aa, synthetic construct
SYGMH

SEQ ID NO: 975 - protein, 17 aa, synthetic construct
VIWYDGSNKDYADSVKG

SEQ ID NO: 976 - protein, 6 aa, synthetic construct
DGEGDY

SEQ ID NO: 977 - protein, 11 aa, synthetic construct
RASQGVRNDFG

SEQ ID NO: 978 - protein, 7 aa, synthetic construct
GASSLQS

SEQ ID NO: 979 - protein, 9 aa, synthetic construct
LQQNSYPWT

SEQ ID NO: 980 - protein, 5 aa, synthetic construct
SYGMH

SEQ ID NO: 981 - protein, 17 aa, synthetic construct
VIWYDGSNKDYADSVKG

SEQ ID NO: 982 - protein, 6 aa, synthetic construct
PGEGDY

SEQ ID NO: 983 - protein, 11 aa, synthetic construct
RASQGVRNDFG

SEQ ID NO: 984 - protein, 7 aa, synthetic construct
GASSLQS

SEQ ID NO: 985 - protein, 9 aa, synthetic construct
LQQNSYPWT

SEQ ID NO: 986 - protein, 5 aa, synthetic construct
SYGMH

SEQ ID NO: 987 - protein, 17 aa, synthetic construct
VIWYDGSNKYYADSVKG

SEQ ID NO: 988 - protein, 6 aa, synthetic construct
PGEGDY

SEQ ID NO: 989 - protein, 11 aa, synthetic construct
RASQGVRNDFG

SEQ ID NO: 990 - protein, 7 aa, synthetic construct
GASSLQS

SEQ ID NO: 991 - protein, 9 aa, synthetic construct
LQQNSYPWT

SEQ ID NO: 992 - protein, 5 aa, synthetic construct
SYGMH

SEQ ID NO: 993 - protein, 17 aa, synthetic construct
VIWYDGSSKDYADSVKG

SEQ ID NO: 994 - protein, 6 aa, synthetic construct
PGEGDY

SEQ ID NO: 995 - protein, 11 aa, synthetic construct
RASQGVRNDFG

SEQ ID NO: 996 - protein, 7 aa, synthetic construct
GASSLQS

SEQ ID NO: 997 - protein, 9 aa, synthetic construct
LQQNSYPWT

SEQ ID NO: 998 - protein, 5 aa, synthetic construct
SYGMH

SEQ ID NO: 999 - protein, 17 aa, synthetic construct
VIWYDGSNKDYADSVKG

SEQ ID NO: 1000 - protein, 6 aa, synthetic construct
PGYGDY

SEQ ID NO: 1001 - protein, 11 aa, synthetic construct
RASQGVRNDFG

SEQ ID NO: 1002 - protein, 7 aa, synthetic construct
GASSLQS

SEQ ID NO: 1003 - protein, 9 aa, synthetic construct
LQQNSYPWT

SEQ ID NO: 1004 - protein, 5 aa, synthetic construct
SYGMH

SEQ ID NO: 1005 - protein, 17 aa, synthetic construct
VIWYDGSNKDYADSVKG

SEQ ID NO: 1006 - protein, 6 aa, synthetic construct
PGEGDY

SEQ ID NO: 1007 - protein, 11 aa, synthetic construct
RASQGVRNDFG

SEQ ID NO: 1008 - protein, 7 aa, synthetic construct
GASSLQS

SEQ ID NO: 1009 - protein, 9 aa, synthetic construct
LQQNSYPWT

SEQ ID NO: 1010 - protein, 5 aa, synthetic construct
SYGMH

SEQ ID NO: 1011 - protein, 17 aa, synthetic construct
VIWYDGSNKDYADSVKG

SEQ ID NO: 1012 - protein, 6 aa, synthetic construct
PGEGDY

SEQ ID NO: 1013 - protein, 11 aa, synthetic construct
RASQGVRNDFG

SEQ ID NO: 1014 - protein, 7 aa, synthetic construct
GASSLQS

SEQ ID NO: 1015 - protein, 9 aa, synthetic construct
LQQNSYPWT

SEQ ID NO: 1016 - protein, 5 aa, synthetic construct
SYGMH

SEQ ID NO: 1017 - protein, 17 aa, synthetic construct
VIWYDGSNKDYADSVKG

SEQ ID NO: 1018 - protein, 6 aa, synthetic construct
PGEFDY

SEQ ID NO: 1019 - protein, 11 aa, synthetic construct
RASQGVRNDFG

SEQ ID NO: 1020 - protein, 7 aa, synthetic construct
GASSLQS

SEQ ID NO: 1021 - protein, 9 aa, synthetic construct
LQQNSYPWT

SEQ ID NO: 1022 - protein, 5 aa, synthetic construct
SYGMH

SEQ ID NO: 1023 - protein, 17 aa, synthetic construct
VIWYDGSNKDYADSVKG

SEQ ID NO: 1024 - protein, 6 aa, synthetic construct
PGEGDY

SEQ ID NO: 1025 - protein, 11 aa, synthetic construct
RASQGVRNDFG

SEQ ID NO: 1026 - protein, 7 aa, synthetic construct
GASSLQS

SEQ ID NO: 1027 - protein, 9 aa, synthetic construct
LQQNSYPWT

SEQ ID NO: 1028 - protein, 5 aa, synthetic construct
SYGMH

SEQ ID NO: 1029 - protein, 17 aa, synthetic construct
VIWYDGSNKDYADSVKG

SEQ ID NO: 1030 - protein, 6 aa, synthetic construct
PGEGDY

SEQ ID NO: 1031 - protein, 11 aa, synthetic construct
RASQGVRNDLG

SEQ ID NO: 1032 - protein, 7 aa, synthetic construct
GASSLQS

SEQ ID NO: 1033 - protein, 9 aa, synthetic construct
LQQNSYPWT

SEQ ID NO: 1034 - protein, 5 aa, synthetic construct
SYGMH

SEQ ID NO: 1035 - protein, 17 aa, synthetic construct
VIWYDGSNKDYADSVKG

SEQ ID NO: 1036 - protein, 6 aa, synthetic construct
PGEGDY

SEQ ID NO: 1037 - protein, 11 aa, synthetic construct
RASQGVRNDFG

SEQ ID NO: 1038 - protein, 7 aa, synthetic construct
GASSLQS

SEQ ID NO: 1039 - protein, 9 aa, synthetic construct
QQQNSYPWT

SEQ ID NO: 1040 - protein, 5 aa, synthetic construct
SYGMH

SEQ ID NO: 1041 - protein, 17 aa, synthetic construct
VIWYDGSNKDYADSVKG

SEQ ID NO: 1042 - protein, 6 aa, synthetic construct
PGEGDY

SEQ ID NO: 1043 - protein, 11 aa, synthetic construct
RASQGVSNDFG

SEQ ID NO: 1044 - protein, 7 aa, synthetic construct
GASSLQS

SEQ ID NO: 1045 - protein, 9 aa, synthetic construct
LQQNSYPWT

SEQ ID NO: 1046 - protein, 5 aa, synthetic construct
SYGMH

SEQ ID NO: 1047 - protein, 17 aa, synthetic construct
VIWYDGSNKDYADSVKG

SEQ ID NO: 1048 - protein, 6 aa, synthetic construct
PGEGDY

SEQ ID NO: 1049 - protein, 11 aa, synthetic construct
RASQGVRNDFG

SEQ ID NO: 1050 - protein, 7 aa, synthetic construct
GASSLQS

SEQ ID NO: 1051 - protein, 9 aa, synthetic construct
LQQNSYPWT

SEQ ID NO: 1052 - protein, 5 aa, synthetic construct
SYGMH

SEQ ID NO: 1053 - protein, 17 aa, synthetic construct
VIWYDGSNKDYADSVKG

SEQ ID NO: 1054 - protein, 6 aa, synthetic construct
PGEGDY

SEQ ID NO: 1055 - protein, 11 aa, synthetic construct
RASQGVRNDFG

SEQ ID NO: 1056 - protein, 7 aa, synthetic construct
GASSLQS

SEQ ID NO: 1057 - protein, 9 aa, synthetic construct
LQYNSYPWT

SEQ ID NO: 1058 - protein, 5 aa, synthetic construct
SYGMH

SEQ ID NO: 1059 - protein, 17 aa, synthetic construct
VIWYDGSNKDYADSVKG

SEQ ID NO: 1060 - protein, 6 aa, synthetic construct
PGEGDY

SEQ ID NO: 1061 - protein, 11 aa, synthetic construct
RASQGVRNDFG

SEQ ID NO: 1062 - protein, 7 aa, synthetic construct
GASSLQS

SEQ ID NO: 1063 - protein, 9 aa, synthetic construct
LQQNSYPFT

SEQ ID NO: 1064 - protein, 5 aa, synthetic construct
SYGMH

SEQ ID NO: 1065 - protein, 17 aa, synthetic construct
VIWYDASNKDYAESVKG

SEQ ID NO: 1066 - protein, 6 aa, synthetic construct
PGEGDY

SEQ ID NO: 1067 - protein, 11 aa, synthetic construct
RASQGVRNDFG

SEQ ID NO: 1068 - protein, 7 aa, synthetic construct
GASSLQS

SEQ ID NO: 1069 - protein, 9 aa, synthetic construct
LQQNSYPWT

SEQ ID NO: 1070 - protein, 5 aa, synthetic construct
SYGMH

SEQ ID NO: 1071 - protein, 17 aa, synthetic construct
VIWYDASNKDYAPSVKG

SEQ ID NO: 1072 - protein, 6 aa, synthetic construct
PGEGDY

SEQ ID NO: 1073 - protein, 11 aa, synthetic construct
RASQGVRNDFG

SEQ ID NO: 1074 - protein, 7 aa, synthetic construct
GASSLQS

SEQ ID NO: 1075 - protein, 9 aa, synthetic construct
LQQNSYPWT

SEQ ID NO: 1076 - protein, 5 aa, synthetic construct
SYGMH

SEQ ID NO: 1077 - protein, 17 aa, synthetic construct
VIWYDGSNKDYADSVKG

SEQ ID NO: 1078 - protein, 6 aa, synthetic construct
PGEGDY

SEQ ID NO: 1079 - protein, 11 aa, synthetic construct
RASQGVRNDFG

SEQ ID NO: 1080 - protein, 7 aa, synthetic construct
GASSLQS

SEQ ID NO: 1081 - protein, 9 aa, synthetic construct
LQQNSYPWT

SEQ ID NO: 1082 - protein, 5 aa, synthetic construct
SYGMH

SEQ ID NO: 1083 - protein, 17 aa, synthetic construct
VIWYDGSNKDYADSVKG

SEQ ID NO: 1084 - protein, 6 aa, synthetic construct
PGEGDY

SEQ ID NO: 1085 - protein, 11 aa, synthetic construct
RASQGVRNDFG

SEQ ID NO: 1086 - protein, 7 aa, synthetic construct
GASSLQS

SEQ ID NO: 1087 - protein, 9 aa, synthetic construct
LQQNSYPWT

SEQ ID NO: 1088 - protein, 5 aa, synthetic construct
SYGMH

SEQ ID NO: 1089 - protein, 17 aa, synthetic construct
VIWYDGSNKDYADSVKG

SEQ ID NO: 1090 - protein, 6 aa, synthetic construct
PGEGDY

SEQ ID NO: 1091 - protein, 11 aa, synthetic construct
RASQGVRNDFG

SEQ ID NO: 1092 - protein, 7 aa, synthetic construct
GASSLQS

SEQ ID NO: 1093 - protein, 9 aa, synthetic construct
LQQNSYPWT

SEQ ID NO: 1094 - protein, 5 aa, synthetic construct
SYGMH

SEQ ID NO: 1095 - protein, 17 aa, synthetic construct
VIWYDGSNKDYADSVKG

SEQ ID NO: 1096 - protein, 6 aa, synthetic construct
PGEGDY

SEQ ID NO: 1097 - protein, 11 aa, synthetic construct
RASQGVRNDFG

SEQ ID NO: 1098 - protein, 7 aa, synthetic construct
GASSLQS

SEQ ID NO: 1099 - protein, 9 aa, synthetic construct
LQQNSYPWT

SEQ ID NO: 1100 - protein, 5 aa, synthetic construct
SYGMH

SEQ ID NO: 1101 - protein, 17 aa, synthetic construct
VIWYDGSNKDYADSVKG

SEQ ID NO: 1102 - protein, 6 aa, synthetic construct
PGEGDY

SEQ ID NO: 1103 - protein, 11 aa, synthetic construct
RASQGVRNDFG

SEQ ID NO: 1104 - protein, 7 aa, synthetic construct
GASSLQS

SEQ ID NO: 1105 - protein, 9 aa, synthetic construct
LQQNSYPWT

SEQ ID NO: 1106 - protein, 5 aa, synthetic construct
SYGMH

SEQ ID NO: 1107 - protein, 17 aa, synthetic construct
VIWYDGSNKDYADSVKG

SEQ ID NO: 1108 - protein, 6 aa, synthetic construct
PGEGDY

SEQ ID NO: 1109 - protein, 11 aa, synthetic construct
RASQGVRNDFG

SEQ ID NO: 1110 - protein, 7 aa, synthetic construct
GASSLQS

SEQ ID NO: 1111 - protein, 9 aa, synthetic construct
LQQNSYPWT

SEQ ID NO: 1112 - protein, 5 aa, synthetic construct
SYGMH

SEQ ID NO: 1113 - protein, 17 aa, synthetic construct
VIWYDGSNKDYADSVKG

SEQ ID NO: 1114 - protein, 6 aa, synthetic construct
PGEGDY

SEQ ID NO: 1115 - protein, 11 aa, synthetic construct
RASQGVRNDFG

SEQ ID NO: 1116 - protein, 7 aa, synthetic construct
GASSLQS

SEQ ID NO: 1117 - protein, 9 aa, synthetic construct
LQQNSYPWT

SEQ ID NO: 1118 - protein, 5 aa, synthetic construct
SYGMH

SEQ ID NO: 1119 - protein, 17 aa, synthetic construct
VIWYDGSNKDYADSVKG

SEQ ID NO: 1120 - protein, 6 aa, synthetic construct
PGEGDY

SEQ ID NO: 1121 - protein, 11 aa, synthetic construct
RASQGVRNDFG

SEQ ID NO: 1122 - protein, 7 aa, synthetic construct
GASSLQS

SEQ ID NO: 1123 - protein, 9 aa, synthetic construct
LQQNSYPWT

SEQ ID NO: 1124 - protein, 5 aa, synthetic construct
SYGMH

SEQ ID NO: 1125 - protein, 17 aa, synthetic construct
VIWYDGSNKDYADSVKG

SEQ ID NO: 1126 - protein, 6 aa, synthetic construct
PGEGDY

SEQ ID NO: 1127 - protein, 11 aa, synthetic construct
RASQGVRNDFG

SEQ ID NO: 1128 - protein, 7 aa, synthetic construct
GASSLQS

SEQ ID NO: 1129 - protein, 9 aa, synthetic construct
LQQNSYPWT

SEQ ID NO: 1130 - protein, 5 aa, synthetic construct
SYAMH

SEQ ID NO: 1131 - protein, 17 aa, synthetic construct
VIWYDGSNKDYADSVKG

SEQ ID NO: 1132 - protein, 6 aa, synthetic construct
PGEGDY

SEQ ID NO: 1133 - protein, 11 aa, synthetic construct
RASQGVRNDFG

SEQ ID NO: 1134 - protein, 7 aa, synthetic construct
GASSLQS

SEQ ID NO: 1135 - protein, 9 aa, synthetic construct
LQQNSYPWT

SEQ ID NO: 1136 - protein, 5 aa, synthetic construct
SYTMH

SEQ ID NO: 1137 - protein, 17 aa, synthetic construct
VIWYDGSNKDYADSVKG

SEQ ID NO: 1138 - protein, 6 aa, synthetic construct
PGEGDY

SEQ ID NO: 1139 - protein, 11 aa, synthetic construct
RASQGVRNDFG

SEQ ID NO: 1140 - protein, 7 aa, synthetic construct
GASSLQS

SEQ ID NO: 1141 - protein, 9 aa, synthetic construct
LQQNSYPWT

SEQ ID NO: 1142 - protein, 5 aa, synthetic construct
SYNMH

SEQ ID NO: 1143 - protein, 17 aa, synthetic construct
VIWYDGSNKDYADSVKG

SEQ ID NO: 1144 - protein, 6 aa, synthetic construct
PGEGDY

SEQ ID NO: 1145 - protein, 11 aa, synthetic construct
RASQGVRNDFG

SEQ ID NO: 1146 - protein, 7 aa, synthetic construct
GASSLQS

SEQ ID NO: 1147 - protein, 9 aa, synthetic construct
LQQNSYPWT

SEQ ID NO: 1148 - protein, 5 aa, synthetic construct
SYQMH

SEQ ID NO: 1149 - protein, 17 aa, synthetic construct
VIWYDGSNKDYADSVKG

SEQ ID NO: 1150 - protein, 6 aa, synthetic construct
PGEGDY

SEQ ID NO: 1151 - protein, 11 aa, synthetic construct
RASQGVRNDFG

SEQ ID NO: 1152 - protein, 7 aa, synthetic construct
GASSLQS

SEQ ID NO: 1153 - protein, 9 aa, synthetic construct
LQQNSYPWT

SEQ ID NO: 1154 - protein, 5 aa, synthetic construct
SYEMH

SEQ ID NO: 1155 - protein, 17 aa, synthetic construct
VIWYDGSNKDYADSVKG

SEQ ID NO: 1156 - protein, 6 aa, synthetic construct
PGEGDY

SEQ ID NO: 1157 - protein, 11 aa, synthetic construct
RASQGVRNDFG

SEQ ID NO: 1158 - protein, 7 aa, synthetic construct
GASSLQS

SEQ ID NO: 1159 - protein, 9 aa, synthetic construct
LQQNSYPWT

SEQ ID NO: 1160 - protein, 5 aa, synthetic construct
SYRMH

SEQ ID NO: 1161 - protein, 17 aa, synthetic construct
VIWYDGSNKDYADSVKG

SEQ ID NO: 1162 - protein, 6 aa, synthetic construct
PGEGDY

SEQ ID NO: 1163 - protein, 11 aa, synthetic construct
RASQGVRNDFG

SEQ ID NO: 1164 - protein, 7 aa, synthetic construct
GASSLQS

SEQ ID NO: 1165 - protein, 9 aa, synthetic construct
LQQNSYPWT

SEQ ID NO: 1166 - protein, 5 aa, synthetic construct
SYWMH

SEQ ID NO: 1167 - protein, 17 aa, synthetic construct
VIWYDGSNKDYADSVKG

SEQ ID NO: 1168 - protein, 6 aa, synthetic construct
PGEGDY

SEQ ID NO: 1169 - protein, 11 aa, synthetic construct
RASQGVRNDFG

SEQ ID NO: 1170 - protein, 7 aa, synthetic construct
GASSLQS

SEQ ID NO: 1171 - protein, 9 aa, synthetic construct
LQQNSYPWT

SEQ ID NO: 1172 - protein, 5 aa, synthetic construct
SYPMH

SEQ ID NO: 1173 - protein, 17 aa, synthetic construct
VIWYDGSNKDYADSVKG

SEQ ID NO: 1174 - protein, 6 aa, synthetic construct
PGEGDY

SEQ ID NO: 1175 - protein, 11 aa, synthetic construct
RASQGVRNDFG

SEQ ID NO: 1176 - protein, 7 aa, synthetic construct
GASSLQS

SEQ ID NO: 1177 - protein, 9 aa, synthetic construct
LQQNSYPWT

SEQ ID NO: 1178 - protein, 5 aa, synthetic construct
SYGMH

SEQ ID NO: 1179 - protein, 17 aa, synthetic construct
VIWYDGSNKDYADSVKG

SEQ ID NO: 1180 - protein, 6 aa, synthetic construct
PGEGDY

SEQ ID NO: 1181 - protein, 11 aa, synthetic construct
RASQGVRNDFG

SEQ ID NO: 1182 - protein, 7 aa, synthetic construct
GASSLQS

SEQ ID NO: 1183 - protein, 9 aa, synthetic construct
LQQNSYPWT

SEQ ID NO: 1184 - protein, 5 aa, synthetic construct
SYGMH

SEQ ID NO: 1185 - protein, 17 aa, synthetic construct
VIWYDGSNKDYADSVKG

SEQ ID NO: 1186 - protein, 6 aa, synthetic construct
PGEGDY

SEQ ID NO: 1187 - protein, 11 aa, synthetic construct
RASQGVRNDFG

SEQ ID NO: 1188 - protein, 7 aa, synthetic construct
GASSLQS

SEQ ID NO: 1189 - protein, 9 aa, synthetic construct
LQQNSYPWT

SEQ ID NO: 1190 - protein, 5 aa, synthetic construct
SYGMH

SEQ ID NO: 1191 - protein, 17 aa, synthetic construct
VIWYDGSNKDYADSVKG

SEQ ID NO: 1192 - protein, 6 aa, synthetic construct
PGEGDY

SEQ ID NO: 1193 - protein, 11 aa, synthetic construct
RASQGVRNDFG

SEQ ID NO: 1194 - protein, 7 aa, synthetic construct
GASSLQS

SEQ ID NO: 1195 - protein, 9 aa, synthetic construct
LQQNSYPWT

SEQ ID NO: 1196 - protein, 5 aa, synthetic construct
SYGMH

SEQ ID NO: 1197 - protein, 17 aa, synthetic construct
VIWYDGSNKDYADSVKG

SEQ ID NO: 1198 - protein, 6 aa, synthetic construct
PGEGDY

SEQ ID NO: 1199 - protein, 11 aa, synthetic construct
RASQGVRNDFG

SEQ ID NO: 1200 - protein, 7 aa, synthetic construct
GASSLQS

SEQ ID NO: 1201 - protein, 9 aa, synthetic construct
LQQNSYPWT

SEQ ID NO: 1202 - protein, 5 aa, synthetic construct
SYGMH

SEQ ID NO: 1203 - protein, 17 aa, synthetic construct
VIWYDGSNKDYADSVKG

SEQ ID NO: 1204 - protein, 6 aa, synthetic construct
PGEGDY

SEQ ID NO: 1205 - protein, 11 aa, synthetic construct
RASQGVRNDFG

SEQ ID NO: 1206 - protein, 7 aa, synthetic construct
GASSLQS

SEQ ID NO: 1207 - protein, 9 aa, synthetic construct
LQQNSYPWT

SEQ ID NO: 1208 - protein, 5 aa, synthetic construct
SYGMH

SEQ ID NO: 1209 - protein, 17 aa, synthetic construct
VIWYDGSNKDYADSVKG

SEQ ID NO: 1210 - protein, 6 aa, synthetic construct
PGEGDY

SEQ ID NO: 1211 - protein, 11 aa, synthetic construct
RASQGVRNDFG

SEQ ID NO: 1212 - protein, 7 aa, synthetic construct
GASSLQS

SEQ ID NO: 1213 - protein, 9 aa, synthetic construct
LQQNSYPWT

SEQ ID NO: 1214 - protein, 5 aa, synthetic construct
SYGMH

SEQ ID NO: 1215 - protein, 17 aa, synthetic construct
VIWYDGSNKDYADSVKG

SEQ ID NO: 1216 - protein, 6 aa, synthetic construct
PGEGDY

SEQ ID NO: 1217 - protein, 11 aa, synthetic construct
RASQGVRNDFG

SEQ ID NO: 1218 - protein, 7 aa, synthetic construct
GASSLQS

SEQ ID NO: 1219 - protein, 9 aa, synthetic construct
LQQNSYPWT

SEQ ID NO: 1220 - protein, 5 aa, synthetic construct
SYGMH

SEQ ID NO: 1221 - protein, 17 aa, synthetic construct
VIWYDGSNTDYADSVKG

SEQ ID NO: 1222 - protein, 6 aa, synthetic construct
PGEGDY

SEQ ID NO: 1223 - protein, 11 aa, synthetic construct
RASQGVRNDFG

SEQ ID NO: 1224 - protein, 7 aa, synthetic construct
GASSLQS

SEQ ID NO: 1225 - protein, 9 aa, synthetic construct
LQQNSYPWT

SEQ ID NO: 1226 - protein, 5 aa, synthetic construct
SYGMH

SEQ ID NO: 1227 - protein, 17 aa, synthetic construct
VIWYDGSNIDYADSVKG

SEQ ID NO: 1228 - protein, 6 aa, synthetic construct
PGEGDY

SEQ ID NO: 1229 - protein, 11 aa, synthetic construct
RASQGVRNDFG

SEQ ID NO: 1230 - protein, 7 aa, synthetic construct
GASSLQS

SEQ ID NO: 1231 - protein, 9 aa, synthetic construct
LQQNSYPWT

SEQ ID NO: 1232 - protein, 5 aa, synthetic construct
SYGMH

SEQ ID NO: 1233 - protein, 17 aa, synthetic construct
VIWYDGSNNDYADSVKG

SEQ ID NO: 1234 - protein, 6 aa, synthetic construct
PGEGDY

SEQ ID NO: 1235 - protein, 11 aa, synthetic construct
RASQGVRNDFG

SEQ ID NO: 1236 - protein, 7 aa, synthetic construct
GASSLQS

SEQ ID NO: 1237 - protein, 9 aa, synthetic construct
LQQNSYPWT

SEQ ID NO: 1238 - protein, 5 aa, synthetic construct
SYGMH

SEQ ID NO: 1239 - protein, 17 aa, synthetic construct
VIWYDGSNRDYADSVKG

SEQ ID NO: 1240 - protein, 6 aa, synthetic construct
PGEGDY

SEQ ID NO: 1241 - protein, 11 aa, synthetic construct
RASQGVRNDFG

SEQ ID NO: 1242 - protein, 7 aa, synthetic construct
GASSLQS

SEQ ID NO: 1243 - protein, 9 aa, synthetic construct
LQQNSYPWT

SEQ ID NO: 1244 - protein, 5 aa, synthetic construct
SYGMH

SEQ ID NO: 1245 - protein, 17 aa, synthetic construct
VIWYDGSNKFYADSVKG

SEQ ID NO: 1246 - protein, 6 aa, synthetic construct
PGEGDY

SEQ ID NO: 1247 - protein, 11 aa, synthetic construct
RASQGVRNDFG

SEQ ID NO: 1248 - protein, 7 aa, synthetic construct
GASSLQS

SEQ ID NO: 1249 - protein, 9 aa, synthetic construct
LQQNSYPWT

SEQ ID NO: 1250 - protein, 5 aa, synthetic construct
SYGMH

SEQ ID NO: 1251 - protein, 17 aa, synthetic construct
VIWYDGSNKNYADSVKG

SEQ ID NO: 1252 - protein, 6 aa, synthetic construct
PGEGDY

SEQ ID NO: 1253 - protein, 11 aa, synthetic construct
RASQGVRNDFG

SEQ ID NO: 1254 - protein, 7 aa, synthetic construct
GASSLQS

SEQ ID NO: 1255 - protein, 9 aa, synthetic construct
LQQNSYPWT

SEQ ID NO: 1256 - protein, 5 aa, synthetic construct
SYGMH

SEQ ID NO: 1257 - protein, 17 aa, synthetic construct
VIWYDGSNKEYADSVKG

SEQ ID NO: 1258 - protein, 6 aa, synthetic construct
PGEGDY

SEQ ID NO: 1259 - protein, 11 aa, synthetic construct
RASQGVRNDFG

SEQ ID NO: 1260 - protein, 7 aa, synthetic construct
GASSLQS

SEQ ID NO: 1261 - protein, 9 aa, synthetic construct
LQQNSYPWT

SEQ ID NO: 1262 - protein, 5 aa, synthetic construct
SYGMH

SEQ ID NO: 1263 - protein, 17 aa, synthetic construct
VIWYDGSNKDYADSVKG

SEQ ID NO: 1264 - protein, 6 aa, synthetic construct
PGEGDY

SEQ ID NO: 1265 - protein, 11 aa, synthetic construct
RASQGVRNDFG

SEQ ID NO: 1266 - protein, 7 aa, synthetic construct
GASSLQS

SEQ ID NO: 1267 - protein, 9 aa, synthetic construct
LQQNSYPWT

SEQ ID NO: 1268 - protein, 5 aa, synthetic construct
SYGMH

SEQ ID NO: 1269 - protein, 17 aa, synthetic construct
VIWYDGSNKDYADSVKG

SEQ ID NO: 1270 - protein, 6 aa, synthetic construct
PGEGDY

SEQ ID NO: 1271 - protein, 11 aa, synthetic construct
RASQGVRNDFG

SEQ ID NO: 1272 - protein, 7 aa, synthetic construct
GASSLQS

SEQ ID NO: 1273 - protein, 9 aa, synthetic construct
LQQNSYPWT

SEQ ID NO: 1274 - protein, 5 aa, synthetic construct
SYGMH

SEQ ID NO: 1275 - protein, 17 aa, synthetic construct
VIWYDGSNKDYADSVKG

SEQ ID NO: 1276 - protein, 6 aa, synthetic construct
PGEGDY

SEQ ID NO: 1277 - protein, 11 aa, synthetic construct
RASQGVRNDFG

SEQ ID NO: 1278 - protein, 7 aa, synthetic construct
GASSLQS

SEQ ID NO: 1279 - protein, 9 aa, synthetic construct
LQQNSYPWT

SEQ ID NO: 1280 - protein, 5 aa, synthetic construct
SYGMH

SEQ ID NO: 1281 - protein, 17 aa, synthetic construct
VIWYDGSNKDYADSVKG

SEQ ID NO: 1282 - protein, 6 aa, synthetic construct
PGEGDY

SEQ ID NO: 1283 - protein, 11 aa, synthetic construct
RASQGVRNDFG

SEQ ID NO: 1284 - protein, 7 aa, synthetic construct
GASSLQS

SEQ ID NO: 1285 - protein, 9 aa, synthetic construct
LQQNSYPWT

SEQ ID NO: 1286 - protein, 5 aa, synthetic construct
SYGMH

SEQ ID NO: 1287 - protein, 17 aa, synthetic construct
VIWYDGSNKDYADSVKG

SEQ ID NO: 1288 - protein, 6 aa, synthetic construct
PGEGDY

SEQ ID NO: 1289 - protein, 11 aa, synthetic construct
RASQGVRNDFG

SEQ ID NO: 1290 - protein, 7 aa, synthetic construct
GASSLQS

SEQ ID NO: 1291 - protein, 9 aa, synthetic construct
LQQNSYPWT

SEQ ID NO: 1292 - protein, 5 aa, synthetic construct
SYGMH

SEQ ID NO: 1293 - protein, 17 aa, synthetic construct
VIWYDGSNKDYADSVKG

SEQ ID NO: 1294 - protein, 6 aa, synthetic construct
PGEGDY

SEQ ID NO: 1295 - protein, 11 aa, synthetic construct
RASQGVRNDFG

SEQ ID NO: 1296 - protein, 7 aa, synthetic construct
GASSLQS

SEQ ID NO: 1297 - protein, 9 aa, synthetic construct
LQQNSYPWT

SEQ ID NO: 1298 - protein, 5 aa, synthetic construct
SYGMH

SEQ ID NO: 1299 - protein, 17 aa, synthetic construct
VIWYDGSNKDYADSVKG

SEQ ID NO: 1300 - protein, 6 aa, synthetic construct
PGEGDY

SEQ ID NO: 1301 - protein, 11 aa, synthetic construct
RASQIVRNDFG

SEQ ID NO: 1302 - protein, 7 aa, synthetic construct
GASSLQS

SEQ ID NO: 1303 - protein, 9 aa, synthetic construct
LQQNSYPWT

SEQ ID NO: 1304 - protein, 5 aa, synthetic construct
SYGMH

SEQ ID NO: 1305 - protein, 17 aa, synthetic construct
VIWYDGSNKDYADSVKG

SEQ ID NO: 1306 - protein, 6 aa, synthetic construct
PGEGDY

SEQ ID NO: 1307 - protein, 11 aa, synthetic construct
RASQSVRNDFG

SEQ ID NO: 1308 - protein, 7 aa, synthetic construct
GASSLQS

SEQ ID NO: 1309 - protein, 9 aa, synthetic construct
LQQNSYPWT

SEQ ID NO: 1310 - protein, 5 aa, synthetic construct
SYGMH

SEQ ID NO: 1311 - protein, 17 aa, synthetic construct
VIWYDGSNKDYADSVKG

SEQ ID NO: 1312 - protein, 6 aa, synthetic construct
PGEGDY

SEQ ID NO: 1313 - protein, 11 aa, synthetic construct
RASQGIRNDFG

SEQ ID NO: 1314 - protein, 7 aa, synthetic construct
GASSLQS

SEQ ID NO: 1315 - protein, 9 aa, synthetic construct
LQQNSYPWT

SEQ ID NO: 1316 - protein, 5 aa, synthetic construct
SYGMH

SEQ ID NO: 1317 - protein, 17 aa, synthetic construct
VIWYDGSNKDYADSVKG

SEQ ID NO: 1318 - protein, 6 aa, synthetic construct
PGEGDY

SEQ ID NO: 1319 - protein, 11 aa, synthetic construct
RASQGVRNEFG

SEQ ID NO: 1320 - protein, 7 aa, synthetic construct
GASSLQS

SEQ ID NO: 1321 - protein, 9 aa, synthetic construct
LQQNSYPWT

SEQ ID NO: 1322 - protein, 5 aa, synthetic construct
SYGMH

SEQ ID NO: 1323 - protein, 17 aa, synthetic construct
VIWYDGSNKDYADSVKG

SEQ ID NO: 1324 - protein, 6 aa, synthetic construct
PGEGDY

SEQ ID NO: 1325 - protein, 11 aa, synthetic construct
RASQGVRNLFG

SEQ ID NO: 1326 - protein, 7 aa, synthetic construct
GASSLQS

SEQ ID NO: 1327 - protein, 9 aa, synthetic construct
LQQNSYPWT

SEQ ID NO: 1328 - protein, 5 aa, synthetic construct
SYGMH

SEQ ID NO: 1329 - protein, 17 aa, synthetic construct
VIWYDGSNKDYADSVKG

SEQ ID NO: 1330 - protein, 6 aa, synthetic construct
PGEGDY

SEQ ID NO: 1331 - protein, 11 aa, synthetic construct
RASQGVRNYFG

SEQ ID NO: 1332 - protein, 7 aa, synthetic construct
GASSLQS

SEQ ID NO: 1333 - protein, 9 aa, synthetic construct
LQQNSYPWT

SEQ ID NO: 1334 - protein, 5 aa, synthetic construct
SYGMH

SEQ ID NO: 1335 - protein, 17 aa, synthetic construct
VIWYDGSNKDYADSVKG

SEQ ID NO: 1336 - protein, 6 aa, synthetic construct
PGEGDY

SEQ ID NO: 1337 - protein, 11 aa, synthetic construct
RASQGVRNDFG

SEQ ID NO: 1338 - protein, 7 aa, synthetic construct
GASSLQS

SEQ ID NO: 1339 - protein, 9 aa, synthetic construct
LQQNSYPWT

SEQ ID NO: 1340 - protein, 5 aa, synthetic construct
SYGMH

SEQ ID NO: 1341 - protein, 17 aa, synthetic construct
VIWYDGSNKDYADSVKG

SEQ ID NO: 1342 - protein, 6 aa, synthetic construct
PGEGDY

SEQ ID NO: 1343 - protein, 11 aa, synthetic construct
RASQGVRNDFG

SEQ ID NO: 1344 - protein, 7 aa, synthetic construct
GASSLQS

SEQ ID NO: 1345 - protein, 9 aa, synthetic construct
LQQNSYPWT

SEQ ID NO: 1346 - protein, 5 aa, synthetic construct
SYGMH

SEQ ID NO: 1347 - protein, 17 aa, synthetic construct
VIWYDGSNKDYADSVKG

SEQ ID NO: 1348 - protein, 6 aa, synthetic construct
PGEGDY

SEQ ID NO: 1349 - protein, 11 aa, synthetic construct
RASQGVRNDFG

SEQ ID NO: 1350 - protein, 7 aa, synthetic construct
GASSLQS

SEQ ID NO: 1351 - protein, 9 aa, synthetic construct
LQQNSYPWT

SEQ ID NO: 1352 - protein, 5 aa, synthetic construct
SYGMH

SEQ ID NO: 1353 - protein, 17 aa, synthetic construct
VIWYDGSNKDYADSVKG

SEQ ID NO: 1354 - protein, 6 aa, synthetic construct
PGEGDY

SEQ ID NO: 1355 - protein, 11 aa, synthetic construct
RASQGVRNDFG

SEQ ID NO: 1356 - protein, 7 aa, synthetic construct
GASQLQS

SEQ ID NO: 1357 - protein, 9 aa, synthetic construct
LQQNSYPWT

SEQ ID NO: 1358 - protein, 5 aa, synthetic construct
SYGMH

SEQ ID NO: 1359 - protein, 17 aa, synthetic construct
VIWYDGSNKDYADSVKG

SEQ ID NO: 1360 - protein, 6 aa, synthetic construct
PGEGDY

SEQ ID NO: 1361 - protein, 11 aa, synthetic construct
RASQGVRNDFG

SEQ ID NO: 1362 - protein, 7 aa, synthetic construct
GASNLQS

SEQ ID NO: 1363 - protein, 9 aa, synthetic construct
LQQNSYPWT

SEQ ID NO: 1364 - protein, 5 aa, synthetic construct
SYGMH

SEQ ID NO: 1365 - protein, 17 aa, synthetic construct
VIWYDGSNKDYADSVKG

SEQ ID NO: 1366 - protein, 6 aa, synthetic construct
PGEGDY

SEQ ID NO: 1367 - protein, 11 aa, synthetic construct
RASQGVRNDFG

SEQ ID NO: 1368 - protein, 7 aa, synthetic construct
GASTLQS

SEQ ID NO: 1369 - protein, 9 aa, synthetic construct
LQQNSYPWT

SEQ ID NO: 1370 - protein, 5 aa, synthetic construct
SYGMH

SEQ ID NO: 1371 - protein, 17 aa, synthetic construct
VIWYDGSNKDYADSVKG

SEQ ID NO: 1372 - protein, 6 aa, synthetic construct
PGEGDY

SEQ ID NO: 1373 - protein, 11 aa, synthetic construct
RASQGVRNDFG

SEQ ID NO: 1374 - protein, 7 aa, synthetic construct
GASSLQS

SEQ ID NO: 1375 - protein, 9 aa, synthetic construct
LQQNSYPWT

SEQ ID NO: 1376 - protein, 5 aa, synthetic construct
SYGMH

SEQ ID NO: 1377 - protein, 17 aa, synthetic construct
VIWYDGSNKDYADSVKG

SEQ ID NO: 1378 - protein, 6 aa, synthetic construct
PGEGDY

SEQ ID NO: 1379 - protein, 11 aa, synthetic construct
RASQGVRNDFG

SEQ ID NO: 1380 - protein, 7 aa, synthetic construct
GASSLQS

SEQ ID NO: 1381 - protein, 9 aa, synthetic construct
LQQNSYPWT

SEQ ID NO: 1382 - protein, 5 aa, synthetic construct
SYGMH

SEQ ID NO: 1383 - protein, 17 aa, synthetic construct
VIWYDGSNKDYADSVKG

SEQ ID NO: 1384 - protein, 6 aa, synthetic construct
PGEGDY

SEQ ID NO: 1385 - protein, 11 aa, synthetic construct
RASQGVRNDFG

SEQ ID NO: 1386 - protein, 7 aa, synthetic construct
GASSLQS

SEQ ID NO: 1387 - protein, 9 aa, synthetic construct
LQQNSYPWT

SEQ ID NO: 1388 - protein, 5 aa, synthetic construct
SYGMH

SEQ ID NO: 1389 - protein, 17 aa, synthetic construct
VIWYDGSNKDYADSVKG

SEQ ID NO: 1390 - protein, 6 aa, synthetic construct
PGEGDY

SEQ ID NO: 1391 - protein, 11 aa, synthetic construct
RASQGVRNDFG

SEQ ID NO: 1392 - protein, 7 aa, synthetic construct
GASSLQS

SEQ ID NO: 1393 - protein, 9 aa, synthetic construct
LQQNSYPWT

SEQ ID NO: 1394 - protein, 5 aa, synthetic construct
SYGMH

SEQ ID NO: 1395 - protein, 17 aa, synthetic construct
VIWYDGSNKDYADSVKG

SEQ ID NO: 1396 - protein, 6 aa, synthetic construct
PGEGDY

SEQ ID NO: 1397 - protein, 11 aa, synthetic construct
RASQGVRNDFG

SEQ ID NO: 1398 - protein, 7 aa, synthetic construct
GASSLQS

SEQ ID NO: 1399 - protein, 9 aa, synthetic construct
LQQNSYPWT

SEQ ID NO: 1400 - protein, 5 aa, synthetic construct
SYGMH

SEQ ID NO: 1401 - protein, 17 aa, synthetic construct
VIWYDGSNKDYADSVKG

SEQ ID NO: 1402 - protein, 6 aa, synthetic construct
PGEGDY

SEQ ID NO: 1403 - protein, 11 aa, synthetic construct
RASQGVRNDFG

SEQ ID NO: 1404 - protein, 7 aa, synthetic construct
GASSLQS

SEQ ID NO: 1405 - protein, 9 aa, synthetic construct
LQQNSYPWT

SEQ ID NO: 1406 - protein, 5 aa, synthetic construct
SYGMH

SEQ ID NO: 1407 - protein, 17 aa, synthetic construct
VIWYDGSNKDYADSVKG

SEQ ID NO: 1408 - protein, 6 aa, synthetic construct
PGEGDY

SEQ ID NO: 1409 - protein, 11 aa, synthetic construct
RASQGVRNDFG

SEQ ID NO: 1410 - protein, 7 aa, synthetic construct
GASSLQS

SEQ ID NO: 1411 - protein, 9 aa, synthetic construct
LQQNSYPWT

SEQ ID NO: 1412 - protein, 5 aa, synthetic construct
SYAMH

SEQ ID NO: 1413 - protein, 17 aa, synthetic construct
VISYDGSNKYYADSVKG

SEQ ID NO: 1414 - protein, 6 aa, synthetic construct
PGEGDY

SEQ ID NO: 1415 - protein, 11 aa, synthetic construct
RASQGVRNDFG

SEQ ID NO: 1416 - protein, 7 aa, synthetic construct
GASSLQS

SEQ ID NO: 1417 - protein, 9 aa, synthetic construct
LQQNSYPWT

SEQ ID NO: 1418 - protein, 5 aa, synthetic construct
SYGMH

SEQ ID NO: 1419 - protein, 17 aa, synthetic construct
VIWYDASNKDYAPSVKG

SEQ ID NO: 1420 - protein, 6 aa, synthetic construct
PGEGDY

SEQ ID NO: 1421 - protein, 11 aa, synthetic construct
RASQGVRNDFG

SEQ ID NO: 1422 - protein, 7 aa, synthetic construct
GASSLQS

SEQ ID NO: 1423 - protein, 9 aa, synthetic construct
LQQNSYPWT

SEQ ID NO: 1424 - protein, 5 aa, synthetic construct
SYGMH

SEQ ID NO: 1425 - protein, 17 aa, synthetic construct
VIWYDASNKDYVPSVKG

SEQ ID NO: 1426 - protein, 6 aa, synthetic construct
PGEGDY

SEQ ID NO: 1427 - protein, 11 aa, synthetic construct
RASQGVRNDFG

SEQ ID NO: 1428 - protein, 7 aa, synthetic construct
GASSLQS

SEQ ID NO: 1429 - protein, 9 aa, synthetic construct
LQQNSYPWT

SEQ ID NO: 1430 - protein, 5 aa, synthetic construct
SYGMH

SEQ ID NO: 1431 - protein, 17 aa, synthetic construct
VIWYDASNKDYAPSVKG

SEQ ID NO: 1432 - protein, 6 aa, synthetic construct
PGEGDY

SEQ ID NO: 1433 - protein, 11 aa, synthetic construct
RASQGVRNDFG

SEQ ID NO: 1434 - protein, 7 aa, synthetic construct
GASSLQS

SEQ ID NO: 1435 - protein, 9 aa, synthetic construct
LQQNSYPWT

SEQ ID NO: 1436 - protein, 5 aa, synthetic construct
SYGMH

SEQ ID NO: 1437 - protein, 17 aa, synthetic construct
VIWYDASNKDYVPSVKG

SEQ ID NO: 1438 - protein, 6 aa, synthetic construct
PGEGDY

SEQ ID NO: 1439 - protein, 11 aa, synthetic construct
RASQGVRNDFG

SEQ ID NO: 1440 - protein, 7 aa, synthetic construct
GASSLQS

SEQ ID NO: 1441 - protein, 9 aa, synthetic construct
LQQNSYPWT

SEQ ID NO: 1442 - protein, 5 aa, synthetic construct
SYGMH

SEQ ID NO: 1443 - protein, 17 aa, synthetic construct
VIWYDASNKDYAPSVKG

SEQ ID NO: 1444 - protein, 6 aa, synthetic construct
PGEGDY

SEQ ID NO: 1445 - protein, 11 aa, synthetic construct
RASQGVRNDFG

SEQ ID NO: 1446 - protein, 7 aa, synthetic construct
GASSLQS

SEQ ID NO: 1447 - protein, 9 aa, synthetic construct
LQQNSYPWT

SEQ ID NO: 1448 - protein, 5 aa, synthetic construct
SYGMH

SEQ ID NO: 1449 - protein, 17 aa, synthetic construct
VIWYDASNKDYVPSVKG

SEQ ID NO: 1450 - protein, 6 aa, synthetic construct
PGEGDY

SEQ ID NO: 1451 - protein, 11 aa, synthetic construct
RASQGVRNDFG

SEQ ID NO: 1452 - protein, 7 aa, synthetic construct
GASSLQS

SEQ ID NO: 1453 - protein, 9 aa, synthetic construct
LQQNSYPWT

SEQ ID NO: 1454 - protein, 5 aa, synthetic construct
SYGMH

SEQ ID NO: 1455 - protein, 17 aa, synthetic construct
VIWYDASNKDYVPSVKG

SEQ ID NO: 1456 - protein, 6 aa, synthetic construct
PGEGDY

SEQ ID NO: 1457 - protein, 11 aa, synthetic construct
RASQGVRNDFG

SEQ ID NO: 1458 - protein, 7 aa, synthetic construct
GASSLQS

SEQ ID NO: 1459 - protein, 9 aa, synthetic construct
LQQNSYPWT

SEQ ID NO: 1460 - protein, 5 aa, synthetic construct
VYGMH

SEQ ID NO: 1461 - protein, 17 aa, synthetic construct
VIWYDASNKDYAPSVKG

SEQ ID NO: 1462 - protein, 6 aa, synthetic construct
PGEGDY

SEQ ID NO: 1463 - protein, 11 aa, synthetic construct
RASQGVRNDFG

SEQ ID NO: 1464 - protein, 7 aa, synthetic construct
GASSLQS

SEQ ID NO: 1465 - protein, 9 aa, synthetic construct
LQQNSYPWT

SEQ ID NO: 1466 - protein, 5 aa, synthetic construct
TYGMH

SEQ ID NO: 1467 - protein, 17 aa, synthetic construct
VIWYDASNKDYAPSVKG

SEQ ID NO: 1468 - protein, 6 aa, synthetic construct
PGEGDY

SEQ ID NO: 1469 - protein, 11 aa, synthetic construct
RASQGVRNDFG

SEQ ID NO: 1470 - protein, 7 aa, synthetic construct
GASSLQS

SEQ ID NO: 1471 - protein, 9 aa, synthetic construct
LQQNSYPWT

SEQ ID NO: 1472 - protein, 5 aa, synthetic construct
SYGMN

SEQ ID NO: 1473 - protein, 17 aa, synthetic construct
VIWYDASNKDYAPSVKG

SEQ ID NO: 1474 - protein, 6 aa, synthetic construct
PGEGDY

SEQ ID NO: 1475 - protein, 11 aa, synthetic construct
RASQGVRNDFG

SEQ ID NO: 1476 - protein, 7 aa, synthetic construct
GASSLQS

SEQ ID NO: 1477 - protein, 9 aa, synthetic construct
LQQNSYPWT

SEQ ID NO: 1478 - protein, 5 aa, synthetic construct
SYGMH

SEQ ID NO: 1479 - protein, 17 aa, synthetic construct
IIWYDASNKDYAPSVKG

SEQ ID NO: 1480 - protein, 6 aa, synthetic construct
PGEGDY

SEQ ID NO: 1481 - protein, 11 aa, synthetic construct
RASQGVRNDFG

SEQ ID NO: 1482 - protein, 7 aa, synthetic construct
GASSLQS

SEQ ID NO: 1483 - protein, 9 aa, synthetic construct
LQQNSYPWT

SEQ ID NO: 1484 - protein, 5 aa, synthetic construct
SYGMH

SEQ ID NO: 1485 - protein, 17 aa, synthetic construct
MIWYDASNKDYAPSVKG

SEQ ID NO: 1486 - protein, 6 aa, synthetic construct
PGEGDY

SEQ ID NO: 1487 - protein, 11 aa, synthetic construct
RASQGVRNDFG

SEQ ID NO: 1488 - protein, 7 aa, synthetic construct
GASSLQS

SEQ ID NO: 1489 - protein, 9 aa, synthetic construct
LQQNSYPWT

SEQ ID NO: 1490 - protein, 5 aa, synthetic construct
SYGMH

SEQ ID NO: 1491 - protein, 17 aa, synthetic construct
RIWYDASNKDYAPSVKG

SEQ ID NO: 1492 - protein, 6 aa, synthetic construct
PGEGDY

SEQ ID NO: 1493 - protein, 11 aa, synthetic construct
RASQGVRNDFG

SEQ ID NO: 1494 - protein, 7 aa, synthetic construct
GASSLQS

SEQ ID NO: 1495 - protein, 9 aa, synthetic construct
LQQNSYPWT

SEQ ID NO: 1496 - protein, 5 aa, synthetic construct
SYGMH

SEQ ID NO: 1497 - protein, 17 aa, synthetic construct
DIWYDASNKDYAPSVKG

SEQ ID NO: 1498 - protein, 6 aa, synthetic construct
PGEGDY

SEQ ID NO: 1499 - protein, 11 aa, synthetic construct
RASQGVRNDFG

SEQ ID NO: 1500 - protein, 7 aa, synthetic construct
GASSLQS

SEQ ID NO: 1501 - protein, 9 aa, synthetic construct
LQQNSYPWT

SEQ ID NO: 1502 - protein, 5 aa, synthetic construct
SYGMH

SEQ ID NO: 1503 - protein, 17 aa, synthetic construct
EIWYDASNKDYAPSVKG

SEQ ID NO: 1504 - protein, 6 aa, synthetic construct
PGEGDY

SEQ ID NO: 1505 - protein, 11 aa, synthetic construct
RASQGVRNDFG

SEQ ID NO: 1506 - protein, 7 aa, synthetic construct
GASSLQS

SEQ ID NO: 1507 - protein, 9 aa, synthetic construct
LQQNSYPWT

SEQ ID NO: 1508 - protein, 5 aa, synthetic construct
SYGMH

SEQ ID NO: 1509 - protein, 17 aa, synthetic construct
AIWYDASNKDYAPSVKG

SEQ ID NO: 1510 - protein, 6 aa, synthetic construct
PGEGDY

SEQ ID NO: 1511 - protein, 11 aa, synthetic construct
RASQGVRNDFG

SEQ ID NO: 1512 - protein, 7 aa, synthetic construct
GASSLQS

SEQ ID NO: 1513 - protein, 9 aa, synthetic construct
LQQNSYPWT

SEQ ID NO: 1514 - protein, 5 aa, synthetic construct
SYGMH

SEQ ID NO: 1515 - protein, 17 aa, synthetic construct
VIWYDASNKDYAPSVKG

SEQ ID NO: 1516 - protein, 6 aa, synthetic construct
PGEGDY

SEQ ID NO: 1517 - protein, 11 aa, synthetic construct
RASQGVRNDFG

SEQ ID NO: 1518 - protein, 7 aa, synthetic construct
GASSLQS

SEQ ID NO: 1519 - protein, 9 aa, synthetic construct
LQQNSYPWT

SEQ ID NO: 1520 - protein, 5 aa, synthetic construct
SYGMH

SEQ ID NO: 1521 - protein, 17 aa, synthetic construct
VIWYDASNKDYAPSVKG

SEQ ID NO: 1522 - protein, 6 aa, synthetic construct
PGEGDY

SEQ ID NO: 1523 - protein, 11 aa, synthetic construct
RASQGVRNDFG

SEQ ID NO: 1524 - protein, 7 aa, synthetic construct
GASSLQS

SEQ ID NO: 1525 - protein, 9 aa, synthetic construct
LQQNSYPWT

SEQ ID NO: 1526 - protein, 5 aa, synthetic construct
SYGMH

SEQ ID NO: 1527 - protein, 17 aa, synthetic construct
VIWYDASNKDYAPSVKG

SEQ ID NO: 1528 - protein, 6 aa, synthetic construct
PGEGDY

SEQ ID NO: 1529 - protein, 11 aa, synthetic construct
RASQGVRNDFG

SEQ ID NO: 1530 - protein, 7 aa, synthetic construct
GASSLQS

SEQ ID NO: 1531 - protein, 9 aa, synthetic construct
LQQNSYPWT

SEQ ID NO: 1532 - protein, 5 aa, synthetic construct
SYGMH

SEQ ID NO: 1533 - protein, 17 aa, synthetic construct
VIWYDASNKDYAPSVKG

SEQ ID NO: 1534 - protein, 6 aa, synthetic construct
PGEGDY

SEQ ID NO: 1535 - protein, 11 aa, synthetic construct
RASQGVRNDFG

SEQ ID NO: 1536 - protein, 7 aa, synthetic construct
GASSLQS

SEQ ID NO: 1537 - protein, 9 aa, synthetic construct
LQQNSYPWT

SEQ ID NO: 1538 - protein, 5 aa, synthetic construct
SYGMH

SEQ ID NO: 1539 - protein, 17 aa, synthetic construct
VIWYDASNKDYAPSVKG

SEQ ID NO: 1540 - protein, 6 aa, synthetic construct
PGEGDY

SEQ ID NO: 1541 - protein, 11 aa, synthetic construct
RASQGVRNDFG

SEQ ID NO: 1542 - protein, 7 aa, synthetic construct
GASSLQS

SEQ ID NO: 1543 - protein, 9 aa, synthetic construct
LQQNSYPWT

SEQ ID NO: 1544 - protein, 5 aa, synthetic construct
SYGMH

SEQ ID NO: 1545 - protein, 17 aa, synthetic construct
VIWYDASNKDYAPSVKG

SEQ ID NO: 1546 - protein, 6 aa, synthetic construct
PGEGDY

SEQ ID NO: 1547 - protein, 11 aa, synthetic construct
RASQGVRNDFG

SEQ ID NO: 1548 - protein, 7 aa, synthetic construct
GASSLQS

SEQ ID NO: 1549 - protein, 9 aa, synthetic construct
LQQNSYPWT

SEQ ID NO: 1550 - protein, 5 aa, synthetic construct
SYGMH

SEQ ID NO: 1551 - protein, 17 aa, synthetic construct
VIWYDASNKDYAPSVKG

SEQ ID NO: 1552 - protein, 6 aa, synthetic construct
PGEGDY

SEQ ID NO: 1553 - protein, 11 aa, synthetic construct
RASQGVRNDFG

SEQ ID NO: 1554 - protein, 7 aa, synthetic construct
GASSLQS

SEQ ID NO: 1555 - protein, 9 aa, synthetic construct
LQQNSYPWT

SEQ ID NO: 1556 - protein, 5 aa, synthetic construct
SYGMH

SEQ ID NO: 1557 - protein, 17 aa, synthetic construct
VIWYDASNKDYAPSVKG

SEQ ID NO: 1558 - protein, 6 aa, synthetic construct
PGEGDY

SEQ ID NO: 1559 - protein, 11 aa, synthetic construct
RASQGVRNDFG

SEQ ID NO: 1560 - protein, 7 aa, synthetic construct
GASSLQS

SEQ ID NO: 1561 - protein, 9 aa, synthetic construct
LQQNSYPWT

SEQ ID NO: 1562 - protein, 5 aa, synthetic construct
SYGMH

SEQ ID NO: 1563 - protein, 17 aa, synthetic construct
VIWYDASNKDYAPSVKG

SEQ ID NO: 1564 - protein, 6 aa, synthetic construct
PGEGDY

SEQ ID NO: 1565 - protein, 11 aa, synthetic construct
RASQGVRNDFG

SEQ ID NO: 1566 - protein, 7 aa, synthetic construct
GASSLQS

SEQ ID NO: 1567 - protein, 9 aa, synthetic construct
LQQNSYPWT

SEQ ID NO: 1568 - protein, 5 aa, synthetic construct
SYGMH

SEQ ID NO: 1569 - protein, 17 aa, synthetic construct
VIWYDASNKDYAPSVKG

SEQ ID NO: 1570 - protein, 6 aa, synthetic construct
PGEGDY

SEQ ID NO: 1571 - protein, 11 aa, synthetic construct
RASQGVRNDFG

SEQ ID NO: 1572 - protein, 7 aa, synthetic construct
GASSLQS

SEQ ID NO: 1573 - protein, 9 aa, synthetic construct
LQQNSYPWT

SEQ ID NO: 1574 - protein, 5 aa, synthetic construct
SYGMH

SEQ ID NO: 1575 - protein, 17 aa, synthetic construct
VIWYDASNKDYAPSVKG

SEQ ID NO: 1576 - protein, 6 aa, synthetic construct
PGEGDY

SEQ ID NO: 1577 - protein, 11 aa, synthetic construct
RASQGVRNDFG

SEQ ID NO: 1578 - protein, 7 aa, synthetic construct
GASSLQS

SEQ ID NO: 1579 - protein, 9 aa, synthetic construct
LQQNSYPWT

SEQ ID NO: 1580 - protein, 5 aa, synthetic construct
SYGMH

SEQ ID NO: 1581 - protein, 17 aa, synthetic construct
VIWYDASNKDYAPSVKG

SEQ ID NO: 1582 - protein, 6 aa, synthetic construct
PGEGDY

SEQ ID NO: 1583 - protein, 11 aa, synthetic construct
RASQGVRNDFG

SEQ ID NO: 1584 - protein, 7 aa, synthetic construct
GASSLQS

SEQ ID NO: 1585 - protein, 9 aa, synthetic construct
LQKNSYPWT

SEQ ID NO: 1586 - protein, 5 aa, synthetic construct
SYGMH

SEQ ID NO: 1587 - protein, 17 aa, synthetic construct
VIWYDASNKDYAPSVKG

SEQ ID NO: 1588 - protein, 6 aa, synthetic construct
PGEGCY

SEQ ID NO: 1589 - protein, 11 aa, synthetic construct
RASQGVRNDFG

SEQ ID NO: 1590 - protein, 7 aa, synthetic construct
GASSLQS

SEQ ID NO: 1591 - protein, 9 aa, synthetic construct
LQCNSYPWT

SEQ ID NO: 1592 - protein, 5 aa, synthetic construct
SYGMH

SEQ ID NO: 1593 - protein, 17 aa, synthetic construct
VIWYDASNKDYAPSVKG

SEQ ID NO: 1594 - protein, 6 aa, synthetic construct
PGEGDY

SEQ ID NO: 1595 - protein, 11 aa, synthetic construct
RASQGVRNDFG

SEQ ID NO: 1596 - protein, 7 aa, synthetic construct
GASSLQS

SEQ ID NO: 1597 - protein, 9 aa, synthetic construct
LQQNSYPWT

SEQ ID NO: 1598 - protein, 5 aa, synthetic construct
SYGMH

SEQ ID NO: 1599 - protein, 17 aa, synthetic construct
VIWYDASNKDYAPSVKG

SEQ ID NO: 1600 - protein, 6 aa, synthetic construct
PGEGDY

SEQ ID NO: 1601 - protein, 11 aa, synthetic construct
RASQGVRNDFG

SEQ ID NO: 1602 - protein, 7 aa, synthetic construct
GASSLQS

SEQ ID NO: 1603 - protein, 9 aa, synthetic construct
LQQNSYPWT

SEQ ID NO: 1604 - protein, 5 aa, synthetic construct
DYGMH

SEQ ID NO: 1605 - protein, 17 aa, synthetic construct
VIWYDASNKDYAPSVKG

SEQ ID NO: 1606 - protein, 6 aa, synthetic construct
PGEGDY

SEQ ID NO: 1607 - protein, 11 aa, synthetic construct
RASQGVRNDFG

SEQ ID NO: 1608 - protein, 7 aa, synthetic construct
GASSLQS

SEQ ID NO: 1609 - protein, 9 aa, synthetic construct
LQQNSYPWT

SEQ ID NO: 1610 - protein, 5 aa, synthetic construct
SDGMH

SEQ ID NO: 1611 - protein, 17 aa, synthetic construct
VIWYDASNKDYAPSVKG

SEQ ID NO: 1612 - protein, 6 aa, synthetic construct
PGEGDY

SEQ ID NO: 1613 - protein, 11 aa, synthetic construct
RASQGVRNDFG

SEQ ID NO: 1614 - protein, 7 aa, synthetic construct
GASSLQS

SEQ ID NO: 1615 - protein, 9 aa, synthetic construct
LQQNSYPWT

SEQ ID NO: 1616 - protein, 5 aa, synthetic construct
SYGMH

SEQ ID NO: 1617 - protein, 17 aa, synthetic construct
VIWYDASNKDYAPSVKG

SEQ ID NO: 1618 - protein, 6 aa, synthetic construct
PGEGDY

SEQ ID NO: 1619 - protein, 11 aa, synthetic construct
RASQGVRNDFG

SEQ ID NO: 1620 - protein, 7 aa, synthetic construct
GASSLQS

SEQ ID NO: 1621 - protein, 9 aa, synthetic construct
LQQNSYPWT

SEQ ID NO: 1622 - protein, 5 aa, synthetic construct
SYGMH

SEQ ID NO: 1623 - protein, 17 aa, synthetic construct
VIWYDASNKDYAPSVKG

SEQ ID NO: 1624 - protein, 6 aa, synthetic construct
PGEGDY

SEQ ID NO: 1625 - protein, 11 aa, synthetic construct
RASQGVRNDFG

SEQ ID NO: 1626 - protein, 7 aa, synthetic construct
GASSLQS

SEQ ID NO: 1627 - protein, 9 aa, synthetic construct
LQQNSYPWT

SEQ ID NO: 1628 - protein, 5 aa, synthetic construct
SYGMH

SEQ ID NO: 1629 - protein, 17 aa, synthetic construct
VIWYDASNKDYAPSVKG

SEQ ID NO: 1630 - protein, 6 aa, synthetic construct
PGEGDY

SEQ ID NO: 1631 - protein, 11 aa, synthetic construct
RASQGVRNDFG

SEQ ID NO: 1632 - protein, 7 aa, synthetic construct
GASSLQS

SEQ ID NO: 1633 - protein, 9 aa, synthetic construct
LQQNSYPWT

SEQ ID NO: 1634 - protein, 5 aa, synthetic construct
SYGMH

SEQ ID NO: 1635 - protein, 17 aa, synthetic construct
VIWYDASNKDYAPSVKG

SEQ ID NO: 1636 - protein, 6 aa, synthetic construct
PGEGDY

SEQ ID NO: 1637 - protein, 11 aa, synthetic construct
RASQGVRNDFG

SEQ ID NO: 1638 - protein, 7 aa, synthetic construct
GASSLQS

SEQ ID NO: 1639 - protein, 9 aa, synthetic construct
LQQNSYPWT

SEQ ID NO: 1640 - protein, 5 aa, synthetic construct
SYGMH

SEQ ID NO: 1641 - protein, 17 aa, synthetic construct
VIWYDASNKDYAPSVKG

SEQ ID NO: 1642 - protein, 6 aa, synthetic construct
PGEGDY

SEQ ID NO: 1643 - protein, 11 aa, synthetic construct
RASQGVRNDFG

SEQ ID NO: 1644 - protein, 7 aa, synthetic construct
GASSLQS

SEQ ID NO: 1645 - protein, 9 aa, synthetic construct
LQQNSYPWT

SEQ ID NO: 1646 - protein, 5 aa, synthetic construct
SYGMH

SEQ ID NO: 1647 - protein, 17 aa, synthetic construct
VIWYDASNKDYAPSVKG

SEQ ID NO: 1648 - protein, 6 aa, synthetic construct
PGEGDY

SEQ ID NO: 1649 - protein, 11 aa, synthetic construct
RASQGVRNDFG

SEQ ID NO: 1650 - protein, 7 aa, synthetic construct
GASSLQS

SEQ ID NO: 1651 - protein, 9 aa, synthetic construct
LQQNSYPWT

SEQ ID NO: 1652 - protein, 5 aa, synthetic construct
SYGMH

SEQ ID NO: 1653 - protein, 17 aa, synthetic construct
VIWYDASNKDYAPSVKG

SEQ ID NO: 1654 - protein, 6 aa, synthetic construct
PGECDY

SEQ ID NO: 1655 - protein, 11 aa, synthetic construct
RASQGVRNDFG

SEQ ID NO: 1656 - protein, 7 aa, synthetic construct
GASSLQS

SEQ ID NO: 1657 - protein, 9 aa, synthetic construct
LQQNSYPWT

SEQ ID NO: 1658 - protein, 5 aa, synthetic construct
SYGMH

SEQ ID NO: 1659 - protein, 17 aa, synthetic construct
VIWYDASNKDYAPSVKG

SEQ ID NO: 1660 - protein, 6 aa, synthetic construct
PGEGDY

SEQ ID NO: 1661 - protein, 11 aa, synthetic construct
RASQGVRNDFG

SEQ ID NO: 1662 - protein, 7 aa, synthetic construct
GASSLQS

SEQ ID NO: 1663 - protein, 9 aa, synthetic construct
LQQNSYPWT

SEQ ID NO: 1664 - protein, 5 aa, synthetic construct
SYGMH

SEQ ID NO: 1665 - protein, 17 aa, synthetic construct
VIWYDASNKDYAPSVKG

SEQ ID NO: 1666 - protein, 6 aa, synthetic construct
PGEGDY

SEQ ID NO: 1667 - protein, 11 aa, synthetic construct
RASQGVRNDFG

SEQ ID NO: 1668 - protein, 7 aa, synthetic construct
GASSLQS

SEQ ID NO: 1669 - protein, 9 aa, synthetic construct
LQQNSYPWT

SEQ ID NO: 1670 - protein, 5 aa, synthetic construct
PYGMH

SEQ ID NO: 1671 - protein, 17 aa, synthetic construct
VIWYDASNKDYAPSVKG

SEQ ID NO: 1672 - protein, 6 aa, synthetic construct
PGEGDY

SEQ ID NO: 1673 - protein, 11 aa, synthetic construct
RASQGVRNDFG

SEQ ID NO: 1674 - protein, 7 aa, synthetic construct
GASSLQS

SEQ ID NO: 1675 - protein, 9 aa, synthetic construct
LQQNSYPWT

SEQ ID NO: 1676 - protein, 5 aa, synthetic construct
SYPMH

SEQ ID NO: 1677 - protein, 17 aa, synthetic construct
VIWYDASNKDYAPSVKG

SEQ ID NO: 1678 - protein, 6 aa, synthetic construct
PGEGDY

SEQ ID NO: 1679 - protein, 11 aa, synthetic construct
RASQGVRNDFG

SEQ ID NO: 1680 - protein, 7 aa, synthetic construct
GASSLQS

SEQ ID NO: 1681 - protein, 9 aa, synthetic construct
LQQNSYPWT

SEQ ID NO: 1682 - protein, 5 aa, synthetic construct
SYGMH

SEQ ID NO: 1683 - protein, 17 aa, synthetic construct
VIWYDAPNKDYAPSVKG

SEQ ID NO: 1684 - protein, 6 aa, synthetic construct
PGEGDY

SEQ ID NO: 1685 - protein, 11 aa, synthetic construct
RASQGVRNDFG

SEQ ID NO: 1686 - protein, 7 aa, synthetic construct
GASSLQS

SEQ ID NO: 1687 - protein, 9 aa, synthetic construct
LQQNSYPWT

SEQ ID NO: 1688 - protein, 5 aa, synthetic construct
SYGMH

SEQ ID NO: 1689 - protein, 17 aa, synthetic construct
VISYDASNKDYAPSVKG

SEQ ID NO: 1690 - protein, 6 aa, synthetic construct
PGEGDY

SEQ ID NO: 1691 - protein, 11 aa, synthetic construct
RASQGVRNDFG

SEQ ID NO: 1692 - protein, 7 aa, synthetic construct
GASSLQS

SEQ ID NO: 1693 - protein, 9 aa, synthetic construct
LQQNSYPWT

SEQ ID NO: 1694 - protein, 5 aa, synthetic construct
SYGMH

SEQ ID NO: 1695 - protein, 17 aa, synthetic construct
VINYDASNKDYAPSVKG

SEQ ID NO: 1696 - protein, 6 aa, synthetic construct
PGEGDY

SEQ ID NO: 1697 - protein, 11 aa, synthetic construct
RASQGVRNDFG

SEQ ID NO: 1698 - protein, 7 aa, synthetic construct
GASSLQS

SEQ ID NO: 1699 - protein, 9 aa, synthetic construct
LQQNSYPWT

SEQ ID NO: 1700 - protein, 5 aa, synthetic construct
SYGMH

SEQ ID NO: 1701 - protein, 17 aa, synthetic construct
VIDYDASNKDYAPSVKG

SEQ ID NO: 1702 - protein, 6 aa, synthetic construct
PGEGDY

SEQ ID NO: 1703 - protein, 11 aa, synthetic construct
RASQGVRNDFG

SEQ ID NO: 1704 - protein, 7 aa, synthetic construct
GASSLQS

SEQ ID NO: 1705 - protein, 9 aa, synthetic construct
LQQNSYPWT

SEQ ID NO: 1706 - protein, 5 aa, synthetic construct
SYGMH

SEQ ID NO: 1707 - protein, 17 aa, synthetic construct
VIRYDASNKDYAPSVKG

SEQ ID NO: 1708 - protein, 6 aa, synthetic construct
PGEGDY

SEQ ID NO: 1709 - protein, 11 aa, synthetic construct
RASQGVRNDFG

SEQ ID NO: 1710 - protein, 7 aa, synthetic construct
GASSLQS

SEQ ID NO: 1711 - protein, 9 aa, synthetic construct
LQQNSYPWT

SEQ ID NO: 1712 - protein, 5 aa, synthetic construct
SYGMH

SEQ ID NO: 1713 - protein, 17 aa, synthetic construct
VIKYDASNKDYAPSVKG

SEQ ID NO: 1714 - protein, 6 aa, synthetic construct
PGEGDY

SEQ ID NO: 1715 - protein, 11 aa, synthetic construct
RASQGVRNDFG

SEQ ID NO: 1716 - protein, 7 aa, synthetic construct
GASSLQS

SEQ ID NO: 1717 - protein, 9 aa, synthetic construct
LQQNSYPWT

SEQ ID NO: 1718 - protein, 5 aa, synthetic construct
SYGMH

SEQ ID NO: 1719 - protein, 17 aa, synthetic construct
VIAYDASNKDYAPSVKG

SEQ ID NO: 1720 - protein, 6 aa, synthetic construct
PGEGDY

SEQ ID NO: 1721 - protein, 11 aa, synthetic construct
RASQGVRNDFG

SEQ ID NO: 1722 - protein, 7 aa, synthetic construct
GASSLQS

SEQ ID NO: 1723 - protein, 9 aa, synthetic construct
LQQNSYPWT

SEQ ID NO: 1724 - protein, 5 aa, synthetic construct
SYGMH

SEQ ID NO: 1725 - protein, 17 aa, synthetic construct
VIWDDASNKDYAPSVKG

SEQ ID NO: 1726 - protein, 6 aa, synthetic construct
PGEGDY

SEQ ID NO: 1727 - protein, 11 aa, synthetic construct
RASQGVRNDFG

SEQ ID NO: 1728 - protein, 7 aa, synthetic construct
GASSLQS

SEQ ID NO: 1729 - protein, 9 aa, synthetic construct
LQQNSYPWT

SEQ ID NO: 1730 - protein, 5 aa, synthetic construct
SYGMH

SEQ ID NO: 1731 - protein, 17 aa, synthetic construct
VIWPDASNKDYAPSVKG

SEQ ID NO: 1732 - protein, 6 aa, synthetic construct
PGEGDY

SEQ ID NO: 1733 - protein, 11 aa, synthetic construct
RASQGVRNDFG

SEQ ID NO: 1734 - protein, 7 aa, synthetic construct
GASSLQS

SEQ ID NO: 1735 - protein, 9 aa, synthetic construct
LQQNSYPWT

SEQ ID NO: 1736 - protein, 5 aa, synthetic construct
SYGMH

SEQ ID NO: 1737 - protein, 17 aa, synthetic construct
VIWNDASNKDYAPSVKG

SEQ ID NO: 1738 - protein, 6 aa, synthetic construct
PGEGDY

SEQ ID NO: 1739 - protein, 11 aa, synthetic construct
RASQGVRNDFG

SEQ ID NO: 1740 - protein, 7 aa, synthetic construct
GASSLQS

SEQ ID NO: 1741 - protein, 9 aa, synthetic construct
LQQNSYPWT

SEQ ID NO: 1742 - protein, 5 aa, synthetic construct
SYGMH

SEQ ID NO: 1743 - protein, 17 aa, synthetic construct
VIWKDASNKDYAPSVKG

SEQ ID NO: 1744 - protein, 6 aa, synthetic construct
PGEGDY

SEQ ID NO: 1745 - protein, 11 aa, synthetic construct
RASQGVRNDFG

SEQ ID NO: 1746 - protein, 7 aa, synthetic construct
GASSLQS

SEQ ID NO: 1747 - protein, 9 aa, synthetic construct
LQQNSYPWT

SEQ ID NO: 1748 - protein, 5 aa, synthetic construct
SYGMH

SEQ ID NO: 1749 - protein, 17 aa, synthetic construct
VIWGDASNKDYAPSVKG

SEQ ID NO: 1750 - protein, 6 aa, synthetic construct
PGEGDY

SEQ ID NO: 1751 - protein, 11 aa, synthetic construct
RASQGVRNDFG

SEQ ID NO: 1752 - protein, 7 aa, synthetic construct
GASSLQS

SEQ ID NO: 1753 - protein, 9 aa, synthetic construct
LQQNSYPWT

SEQ ID NO: 1754 - protein, 5 aa, synthetic construct
SYGMH

SEQ ID NO: 1755 - protein, 17 aa, synthetic construct
VIWSDASNKDYAPSVKG

SEQ ID NO: 1756 - protein, 6 aa, synthetic construct
PGEGDY

SEQ ID NO: 1757 - protein, 11 aa, synthetic construct
RASQGVRNDFG

SEQ ID NO: 1758 - protein, 7 aa, synthetic construct
GASSLQS

SEQ ID NO: 1759 - protein, 9 aa, synthetic construct
LQQNSYPWT

SEQ ID NO: 1760 - protein, 5 aa, synthetic construct
SYGMH

SEQ ID NO: 1761 - protein, 17 aa, synthetic construct
VIWYDASNKDYAPSVKG

SEQ ID NO: 1762 - protein, 6 aa, synthetic construct
PGEGDV

SEQ ID NO: 1763 - protein, 11 aa, synthetic construct
RASQGVRNDFG

SEQ ID NO: 1764 - protein, 7 aa, synthetic construct
GASSLQS

SEQ ID NO: 1765 - protein, 9 aa, synthetic construct
LQQNSYPWT

SEQ ID NO: 1766 - protein, 5 aa, synthetic construct
SYGMH

SEQ ID NO: 1767 - protein, 17 aa, synthetic construct
VIWYDASNKDYAPSVKG

SEQ ID NO: 1768 - protein, 6 aa, synthetic construct
PGEGDR

SEQ ID NO: 1769 - protein, 11 aa, synthetic construct
RASQGVRNDFG

SEQ ID NO: 1770 - protein, 7 aa, synthetic construct
GASSLQS

SEQ ID NO: 1771 - protein, 9 aa, synthetic construct
LQQNSYPWT

SEQ ID NO: 1772 - protein, 5 aa, synthetic construct
SYGMH

SEQ ID NO: 1773 - protein, 17 aa, synthetic construct
VIWYDASNKDYAPSVKG

SEQ ID NO: 1774 - protein, 6 aa, synthetic construct
PGEGDP

SEQ ID NO: 1775 - protein, 11 aa, synthetic construct
RASQGVRNDFG

SEQ ID NO: 1776 - protein, 7 aa, synthetic construct
GASSLQS

SEQ ID NO: 1777 - protein, 9 aa, synthetic construct
LQQNSYPWT

SEQ ID NO: 1778 - protein, 5 aa, synthetic construct
SYGMH

SEQ ID NO: 1779 - protein, 17 aa, synthetic construct
VIWYDASNKDYAPSVKG

SEQ ID NO: 1780 - protein, 6 aa, synthetic construct
PGEGDA

SEQ ID NO: 1781 - protein, 11 aa, synthetic construct
RASQGVRNDFG

SEQ ID NO: 1782 - protein, 7 aa, synthetic construct
GASSLQS

SEQ ID NO: 1783 - protein, 9 aa, synthetic construct
LQQNSYPWT

SEQ ID NO: 1784 - protein, 5 aa, synthetic construct
SYGMH

SEQ ID NO: 1785 - protein, 17 aa, synthetic construct
VIWYDASNKDYAPSVKG

SEQ ID NO: 1786 - protein, 6 aa, synthetic construct
PGEGDY

SEQ ID NO: 1787 - protein, 11 aa, synthetic construct
RASQGVRNDFG

SEQ ID NO: 1788 - protein, 7 aa, synthetic construct
GDSSLQS

SEQ ID NO: 1789 - protein, 9 aa, synthetic construct
LQQNSYPWT

SEQ ID NO: 1790 - protein, 5 aa, synthetic construct
SYGMH

SEQ ID NO: 1791 - protein, 17 aa, synthetic construct
VIWYDASNKDYAPSVKG

SEQ ID NO: 1792 - protein, 6 aa, synthetic construct
PGEGDY

SEQ ID NO: 1793 - protein, 11 aa, synthetic construct
RASQGVRNDFG

SEQ ID NO: 1794 - protein, 7 aa, synthetic construct
GADSLQS

SEQ ID NO: 1795 - protein, 9 aa, synthetic construct
LQQNSYPWT

SEQ ID NO: 1796 - protein, 5 aa, synthetic construct
SYGMH

SEQ ID NO: 1797 - protein, 17 aa, synthetic construct
VIWYDASNKDYAPSVKG

SEQ ID NO: 1798 - protein, 6 aa, synthetic construct
PGEGDY

SEQ ID NO: 1799 - protein, 11 aa, synthetic construct
RASQGVRNDFG

SEQ ID NO: 1800 - protein, 7 aa, synthetic construct
GDDSLQS

SEQ ID NO: 1801 - protein, 9 aa, synthetic construct
LQQNSYPWT

SEQ ID NO: 1802 - protein, 5 aa, synthetic construct
SYGMH

SEQ ID NO: 1803 - protein, 17 aa, synthetic construct
VIWYDASNKDYAPSVKG

SEQ ID NO: 1804 - protein, 6 aa, synthetic construct
PGEGDY

SEQ ID NO: 1805 - protein, 11 aa, synthetic construct
RASQGVRNDFG

SEQ ID NO: 1806 - protein, 7 aa, synthetic construct
GASSLQS

SEQ ID NO: 1807 - protein, 9 aa, synthetic construct
LQQNSYPWT

SEQ ID NO: 1808 - protein, 5 aa, synthetic construct
SYGMH

SEQ ID NO: 1809 - protein, 17 aa, synthetic construct
VIWYDASNKDYAPSVKG

SEQ ID NO: 1810 - protein, 6 aa, synthetic construct
PGEGDY

SEQ ID NO: 1811 - protein, 11 aa, synthetic construct
RASQGVRNDFG

SEQ ID NO: 1812 - protein, 7 aa, synthetic construct
AASSLQS

SEQ ID NO: 1813 - protein, 9 aa, synthetic construct
LQQNSYPWT

SEQ ID NO: 1814 - protein, 5 aa, synthetic construct
SYGMH

SEQ ID NO: 1815 - protein, 17 aa, synthetic construct
VIWYDASNKDYAPSVKG

SEQ ID NO: 1816 - protein, 6 aa, synthetic construct
PGEGDY

SEQ ID NO: 1817 - protein, 11 aa, synthetic construct
RASQGVRNDFG

SEQ ID NO: 1818 - protein, 7 aa, synthetic construct
GASSLQS

SEQ ID NO: 1819 - protein, 9 aa, synthetic construct
LQQNSYPWT

SEQ ID NO: 1820 - protein, 5 aa, synthetic construct
SYGMH

SEQ ID NO: 1821 - protein, 17 aa, synthetic construct
VIWYDASNKDYAPSVKG

SEQ ID NO: 1822 - protein, 6 aa, synthetic construct
PGEGDY

SEQ ID NO: 1823 - protein, 11 aa, synthetic construct
RASQGVRNDFG

SEQ ID NO: 1824 - protein, 7 aa, synthetic construct
GASSLQS

SEQ ID NO: 1825 - protein, 9 aa, synthetic construct
LQQNSYPWT

SEQ ID NO: 1826 - protein, 5 aa, synthetic construct
SYGMH

SEQ ID NO: 1827 - protein, 17 aa, synthetic construct
VIWYDASNKDYAPSVKG

SEQ ID NO: 1828 - protein, 6 aa, synthetic construct
PGEGDY

SEQ ID NO: 1829 - protein, 11 aa, synthetic construct
RASQGVRNDFG

SEQ ID NO: 1830 - protein, 7 aa, synthetic construct
GASSLQS

SEQ ID NO: 1831 - protein, 9 aa, synthetic construct
LQQNSYPWT

SEQ ID NO: 1832 - protein, 5 aa, synthetic construct
SYGMH

SEQ ID NO: 1833 - protein, 17 aa, synthetic construct
VIWYDASNKDYAPSVKG

SEQ ID NO: 1834 - protein, 6 aa, synthetic construct
PGEGDY

SEQ ID NO: 1835 - protein, 11 aa, synthetic construct
RASQGVRNDFG

SEQ ID NO: 1836 - protein, 7 aa, synthetic construct
GASSLCS

SEQ ID NO: 1837 - protein, 9 aa, synthetic construct
LQQNSYPWT

SEQ ID NO: 1838 - protein, 5 aa, synthetic construct
SYGMH

SEQ ID NO: 1839 - protein, 17 aa, synthetic construct
VIWYDASNKDYAPSVKG

SEQ ID NO: 1840 - protein, 6 aa, synthetic construct
PGEGDY

SEQ ID NO: 1841 - protein, 11 aa, synthetic construct
RASQGVRNDFG

SEQ ID NO: 1842 - protein, 7 aa, synthetic construct
DASSLQS

SEQ ID NO: 1843 - protein, 9 aa, synthetic construct
LQQNSYPWT

SEQ ID NO: 1844 - protein, 5 aa, synthetic construct
SYGMH

SEQ ID NO: 1845 - protein, 17 aa, synthetic construct
VIWYDASNKDYAPSVKG

SEQ ID NO: 1846 - protein, 6 aa, synthetic construct
PGEGDY

SEQ ID NO: 1847 - protein, 11 aa, synthetic construct
RASQGVRNDFG

SEQ ID NO: 1848 - protein, 7 aa, synthetic construct
EASSLQS

SEQ ID NO: 1849 - protein, 9 aa, synthetic construct
LQQNSYPWT

SEQ ID NO: 1850 - protein, 5 aa, synthetic construct
SYGMH

SEQ ID NO: 1851 - protein, 17 aa, synthetic construct
VIWYDASNKDYAPSVKG

SEQ ID NO: 1852 - protein, 6 aa, synthetic construct
PGEGDY

SEQ ID NO: 1853 - protein, 11 aa, synthetic construct
RASQGVRNDFG

SEQ ID NO: 1854 - protein, 7 aa, synthetic construct
KASSLQS

SEQ ID NO: 1855 - protein, 9 aa, synthetic construct
LQQNSYPWT

SEQ ID NO: 1856 - protein, 5 aa, synthetic construct
SYGMH

SEQ ID NO: 1857 - protein, 17 aa, synthetic construct
VIWYDASNKDYAPSVKG

SEQ ID NO: 1858 - protein, 6 aa, synthetic construct
PGEGDY

SEQ ID NO: 1859 - protein, 11 aa, synthetic construct
RASQGVRNDFG

SEQ ID NO: 1860 - protein, 7 aa, synthetic construct
LASSLQS

SEQ ID NO: 1861 - protein, 9 aa, synthetic construct
LQQNSYPWT

SEQ ID NO: 1862 - protein, 5 aa, synthetic construct
SYGMH

SEQ ID NO: 1863 - protein, 17 aa, synthetic construct
VIWYDASNKDYAPSVKG

SEQ ID NO: 1864 - protein, 6 aa, synthetic construct
PGEGDY

SEQ ID NO: 1865 - protein, 11 aa, synthetic construct
RASQGVRNDFG

SEQ ID NO: 1866 - protein, 7 aa, synthetic construct
SASSLQS

SEQ ID NO: 1867 - protein, 9 aa, synthetic construct
LQQNSYPWT

SEQ ID NO: 1868 - protein, 5 aa, synthetic construct
SYGMH

SEQ ID NO: 1869 - protein, 17 aa, synthetic construct
VIWYDASNKDYAPSVKG

SEQ ID NO: 1870 - protein, 6 aa, synthetic construct
PGEGDY

SEQ ID NO: 1871 - protein, 11 aa, synthetic construct
RASQGVRNDFG

SEQ ID NO: 1872 - protein, 7 aa, synthetic construct
GVSSLQS

SEQ ID NO: 1873 - protein, 9 aa, synthetic construct
LQQNSYPWT

SEQ ID NO: 1874 - protein, 5 aa, synthetic construct
SYGMH

SEQ ID NO: 1875 - protein, 17 aa, synthetic construct
VIWYDASNKDYAPSVKG

SEQ ID NO: 1876 - protein, 6 aa, synthetic construct
PGEGDY

SEQ ID NO: 1877 - protein, 11 aa, synthetic construct
RASQGVRNDFG

SEQ ID NO: 1878 - protein, 7 aa, synthetic construct
GESSLQS

SEQ ID NO: 1879 - protein, 9 aa, synthetic construct
LQQNSYPWT

SEQ ID NO: 1880 - protein, 5 aa, synthetic construct
SYGMH

SEQ ID NO: 1881 - protein, 17 aa, synthetic construct
VIWYDASNKDYAPSVKG

SEQ ID NO: 1882 - protein, 6 aa, synthetic construct
PGEGDY

SEQ ID NO: 1883 - protein, 11 aa, synthetic construct
RASQGVRNDFG

SEQ ID NO: 1884 - protein, 7 aa, synthetic construct
GPSSLQS

SEQ ID NO: 1885 - protein, 9 aa, synthetic construct
LQQNSYPWT

SEQ ID NO: 1886 - protein, 5 aa, synthetic construct
SYGMH

SEQ ID NO: 1887 - protein, 17 aa, synthetic construct
VIWYDASNKDYAPSVKG

SEQ ID NO: 1888 - protein, 6 aa, synthetic construct
PGEGDY

SEQ ID NO: 1889 - protein, 11 aa, synthetic construct
RASQGVRNDFG

SEQ ID NO: 1890 - protein, 7 aa, synthetic construct
GATSLQS

SEQ ID NO: 1891 - protein, 9 aa, synthetic construct
LQQNSYPWT

SEQ ID NO: 1892 - protein, 5 aa, synthetic construct
SYGMH

SEQ ID NO: 1893 - protein, 17 aa, synthetic construct
VIWYDASNKDYAPSVKG

SEQ ID NO: 1894 - protein, 6 aa, synthetic construct
PGEGDY

SEQ ID NO: 1895 - protein, 11 aa, synthetic construct
RASQGVRNDFG

SEQ ID NO: 1896 - protein, 7 aa, synthetic construct
GAPSLQS

SEQ ID NO: 1897 - protein, 9 aa, synthetic construct
LQQNSYPWT

SEQ ID NO: 1898 - protein, 5 aa, synthetic construct
SYGMH

SEQ ID NO: 1899 - protein, 17 aa, synthetic construct
VIWYDASNKDYAPSVKG

SEQ ID NO: 1900 - protein, 6 aa, synthetic construct
PGEGDY

SEQ ID NO: 1901 - protein, 11 aa, synthetic construct
RASQGVRNDFG

SEQ ID NO: 1902 - protein, 7 aa, synthetic construct
GASRLQS

SEQ ID NO: 1903 - protein, 9 aa, synthetic construct
LQQNSYPWT

SEQ ID NO: 1904 - protein, 5 aa, synthetic construct
SYGMH

SEQ ID NO: 1905 - protein, 17 aa, synthetic construct
VIWYDASNKDYAPSVKG

SEQ ID NO: 1906 - protein, 6 aa, synthetic construct
PGEGDY

SEQ ID NO: 1907 - protein, 11 aa, synthetic construct
RASQGVRNDFG

SEQ ID NO: 1908 - protein, 7 aa, synthetic construct
GASKLQS

SEQ ID NO: 1909 - protein, 9 aa, synthetic construct
LQQNSYPWT

SEQ ID NO: 1910 - protein, 5 aa, synthetic construct
SYGMH

SEQ ID NO: 1911 - protein, 17 aa, synthetic construct
VIWYDASNKDYAPSVKG

SEQ ID NO: 1912 - protein, 6 aa, synthetic construct
PGEGDY

SEQ ID NO: 1913 - protein, 11 aa, synthetic construct
RASQGVRNDFG

SEQ ID NO: 1914 - protein, 7 aa, synthetic construct
GASDLQS

SEQ ID NO: 1915 - protein, 9 aa, synthetic construct
LQQNSYPWT

SEQ ID NO: 1916 - protein, 5 aa, synthetic construct
SYGMH

SEQ ID NO: 1917 - protein, 17 aa, synthetic construct
VIWYDASNKDYAPSVKG

SEQ ID NO: 1918 - protein, 6 aa, synthetic construct
PGEGDY

SEQ ID NO: 1919 - protein, 11 aa, synthetic construct
RASQGVRNDFG

SEQ ID NO: 1920 - protein, 7 aa, synthetic construct
GASILQS

SEQ ID NO: 1921 - protein, 9 aa, synthetic construct
LQQNSYPWT

SEQ ID NO: 1922 - protein, 5 aa, synthetic construct
SYGMH

SEQ ID NO: 1923 - protein, 17 aa, synthetic construct
VIWYDASNKDYAPSVKG

SEQ ID NO: 1924 - protein, 6 aa, synthetic construct
PGEGDY

SEQ ID NO: 1925 - protein, 11 aa, synthetic construct
RASQGVRNDFG

SEQ ID NO: 1926 - protein, 7 aa, synthetic construct
GASLLQS

SEQ ID NO: 1927 - protein, 9 aa, synthetic construct
LQQNSYPWT

SEQ ID NO: 1928 - protein, 5 aa, synthetic construct
SYGMH

SEQ ID NO: 1929 - protein, 17 aa, synthetic construct
VIWYDASNKDYAPSVKG

SEQ ID NO: 1930 - protein, 6 aa, synthetic construct
PGEGDY

SEQ ID NO: 1931 - protein, 11 aa, synthetic construct
RASQGVRNDFG

SEQ ID NO: 1932 - protein, 7 aa, synthetic construct
GASSRQS

SEQ ID NO: 1933 - protein, 9 aa, synthetic construct
LQQNSYPWT

SEQ ID NO: 1934 - protein, 5 aa, synthetic construct
SYGMH

SEQ ID NO: 1935 - protein, 17 aa, synthetic construct
VIWYDASNKDYAPSVKG

SEQ ID NO: 1936 - protein, 6 aa, synthetic construct
PGEGDY

SEQ ID NO: 1937 - protein, 11 aa, synthetic construct
RASQGVRNDFG

SEQ ID NO: 1938 - protein, 7 aa, synthetic construct
GASSPQS

SEQ ID NO: 1939 - protein, 9 aa, synthetic construct
LQQNSYPWT

SEQ ID NO: 1940 - protein, 5 aa, synthetic construct
SYGMH

SEQ ID NO: 1941 - protein, 17 aa, synthetic construct
VIWYDASNKDYAPSVKG

SEQ ID NO: 1942 - protein, 6 aa, synthetic construct
PGEGDY

SEQ ID NO: 1943 - protein, 11 aa, synthetic construct
RASQGVRNDFG

SEQ ID NO: 1944 - protein, 7 aa, synthetic construct
GASSLPS

SEQ ID NO: 1945 - protein, 9 aa, synthetic construct
LQQNSYPWT

SEQ ID NO: 1946 - protein, 5 aa, synthetic construct
SYGMH

SEQ ID NO: 1947 - protein, 17 aa, synthetic construct
VIWYDASNKDYAPSVKG

SEQ ID NO: 1948 - protein, 6 aa, synthetic construct
PGEGDY

SEQ ID NO: 1949 - protein, 11 aa, synthetic construct
RASQGVRNDFG

SEQ ID NO: 1950 - protein, 7 aa, synthetic construct
GASSLAS

SEQ ID NO: 1951 - protein, 9 aa, synthetic construct
LQQNSYPWT

SEQ ID NO: 1952 - protein, 5 aa, synthetic construct
SYGMH

SEQ ID NO: 1953 - protein, 17 aa, synthetic construct
VIWYDASNKDYAPSVKG

SEQ ID NO: 1954 - protein, 6 aa, synthetic construct
PGEGDY

SEQ ID NO: 1955 - protein, 11 aa, synthetic construct
RASQGVRNDFG

SEQ ID NO: 1956 - protein, 7 aa, synthetic construct
GASSLES

SEQ ID NO: 1957 - protein, 9 aa, synthetic construct
LQQNSYPWT

SEQ ID NO: 1958 - protein, 5 aa, synthetic construct
SYGMH

SEQ ID NO: 1959 - protein, 17 aa, synthetic construct
VIWYDASNKDYAPSVKG

SEQ ID NO: 1960 - protein, 6 aa, synthetic construct
PGEGDY

SEQ ID NO: 1961 - protein, 11 aa, synthetic construct
RASQGIRNDLG

SEQ ID NO: 1962 - protein, 7 aa, synthetic construct
AASSLQS

SEQ ID NO: 1963 - protein, 9 aa, synthetic construct
LQHNSYPWT

SEQ ID NO: 1964 - protein, 5 aa, synthetic construct
SYGMH

SEQ ID NO: 1965 - protein, 17 aa, synthetic construct
VIWYDASNKDYAPSVKG

SEQ ID NO: 1966 - protein, 6 aa, synthetic construct
PGEGDY

SEQ ID NO: 1967 - protein, 11 aa, synthetic construct
RASQSVSSYLA

SEQ ID NO: 1968 - protein, 7 aa, synthetic construct
DASNRAT

SEQ ID NO: 1969 - protein, 9 aa, synthetic construct
QQRSNWPYT

SEQ ID NO: 1970 - protein, 5 aa, synthetic construct
SYGMH

SEQ ID NO: 1971 - protein, 17 aa, synthetic construct
VIWYDASNKDYAPSVKG

SEQ ID NO: 1972 - protein, 6 aa, synthetic construct
PGEGDY

SEQ ID NO: 1973 - protein, 11 aa, synthetic construct
RASQSISSYLN

SEQ ID NO: 1974 - protein, 7 aa, synthetic construct
AASSLQS

SEQ ID NO: 1975 - protein, 9 aa, synthetic construct
QQSYSTPFT

SEQ ID NO: 1976 - protein, 5 aa, synthetic construct
SYGMH

SEQ ID NO: 1977 - protein, 17 aa, synthetic construct
VIWYDASNKEYAPSVKG

SEQ ID NO: 1978 - protein, 6 aa, synthetic construct
PGEGDY

SEQ ID NO: 1979 - protein, 11 aa, synthetic construct
RASQGVRNDFG

SEQ ID NO: 1980 - protein, 7 aa, synthetic construct
GASSLQS

SEQ ID NO: 1981 - protein, 9 aa, synthetic construct
LQQNSYPWT

SEQ ID NO: 1982 - protein, 5 aa, synthetic construct
SYGMH

SEQ ID NO: 1983 - protein, 17 aa, synthetic construct
VIWYDASNKEYAPSVKG

SEQ ID NO: 1984 - protein, 6 aa, synthetic construct
PGEGDY

SEQ ID NO: 1985 - protein, 11 aa, synthetic construct
RASQSVSSYLA

SEQ ID NO: 1986 - protein, 7 aa, synthetic construct
GASSLQS

SEQ ID NO: 1987 - protein, 9 aa, synthetic construct
LQQNSYPWT

SEQ ID NO: 1988 - protein, 5 aa, synthetic construct
SYGMH

SEQ ID NO: 1989 - protein, 17 aa, synthetic construct
VIWYDASNKDYAPSVKG

SEQ ID NO: 1990 - protein, 6 aa, synthetic construct
PGEGDY

SEQ ID NO: 1991 - protein, 11 aa, synthetic construct
RASQSVSSYLA

SEQ ID NO: 1992 - protein, 7 aa, synthetic construct
GASSLQS

SEQ ID NO: 1993 - protein, 9 aa, synthetic construct
LQQNSYPWT

SEQ ID NO: 1994 - protein, 113 aa, synthetic construct
EVQLVESGGGLVQPGGSLRLSCAASGFTFSSYAMNWVRQAPGKGLEWVSGISGNGGRIYYADSVKGRFTISRDNSKNTLYLQMNSLRVEDTAVYYCAKDLDVWGKGTTVTVSS

SEQ ID NO: 1995 - protein, 112 aa, synthetic construct
DVVMTQTPLSSPVTLGQSASISCRSSQSLVHSDGNTYLNWLHQRPGQPPRLLIYKISNRFSGVPDRFSGSGAGTDFTLKISRVEAEDVGVYYCMQATQFPLTFGGGTKLEIK

SEQ ID NO: 1996 - protein, 114 aa, synthetic construct
EVQLVESGGGVVQPGRSLRLSCAASGFTFNSYGMHWVRQAPGKGLEWVAVLWYDGINKNYADSVKGRFAISRDNSKNTLYLQMNSLRVEDTAVYYCVRVQGDYWGQGTLVTVSS

SEQ ID NO: 1997 - protein, 107 aa, synthetic construct
DIQMTQSPSSLSASVGDRVTITCRASQGIRNDLTWYQQKPGKAPKRLIYDTSSLQSGVPSRFSGSRSGTEFTLTISSLQPEDFASYFCLQHNSYPFTFGQGTKLEIK

SEQ ID NO: 1998 - protein, 115 aa, synthetic construct
EVQLVESGGGVVQPGRSLRLSCAASGFTFSSYGMHWVRQVPGKGLEWVAVIWYDGSNKDYVDSVKGRFTISRDNSKNTLYLQMNSLRAEDTAVYYCARPGEGDYWGQGTLVTVSS

SEQ ID NO: 1999 - protein, 107 aa, synthetic construct
DIQMTQSPSSLSASVGDRVTITCRASQGIRNDFGWYQQKPGKAPKRLIYGASSLQSGVPSRFSGSGSGTEFTLTISSLQPEDFATYYCLQQNSYPWTFGQGTKVEIK

SEQ ID NO: 2000 - protein, 115 aa, synthetic construct
EVQLVESGGGVVQPGRSLRLSCAASGFTFSSYGMHWVRQAPGKGLEWVAVIWYDGSNKDYADSVKGRFTISRDNSKNTLYLQMNSLRAEDTAVYYCARPGEGDYWGQGTLVTVSS

SEQ ID NO: 2001 - protein, 107 aa, synthetic construct
DIQMTQSPSSLSASVGDRVTITCRASQGIRNDLGWYQQKPGRAPKRLIYAASSLQSGVPSRFSGSGSGTEFTLTISSLQPEDFATYYCLQQNSYPWTFGQGTKVEIK

SEQ ID NO: 2002 - protein, 113 aa, synthetic construct
EVQLVESGGGLVQPGGSLRLSCAASGFTFSSYAMNWVRQVPGKGLEGVSGMSGSGGRIYYADSVKGRFTMSRDNSKNMVYLQMNSLRAEDTALYYCAKDLDVWGKGTTVTVSS

SEQ ID NO: 2003 - protein, 112 aa, synthetic construct
DVVMTQTPLSSPVTLGQPASISCRSSQNLVHSDGNTYLNWLQQRPGQPPRLLIYKISNRFSGVPDRFSGSGAGTDFTLKISRVEAEDVGVYYCMQATQFPLTFGGGTKLEIK

SEQ ID NO: 2004 - protein, 114 aa, synthetic construct
EVQLVESGGGVVQPGRSLRLSCAASGFTFSSYGMHWVRQAPGKGLEWVAVLWYDGINKNYVDSVKGRFAISRDNSKNTLYLQMNSLRVEDTAVYFCVRVQGDYWGQGTLVTVSS

SEQ ID NO: 2005 - protein, 107 aa, synthetic construct
DIQMTQSPSSLSASVGDRVTITCRASQGIRNDLTWYQQKPGKAPKRLIYDTSSLQSGVPSRFSGSGSGTDFTLTISSLQPEDFASYFCLQHNIYPFTFGQGTKLEIK

SEQ ID NO: 2006 - protein, 114 aa, synthetic construct
EVQLVESGGGVVQPGRSLRLSCAASGFTFSSYGMHWVRQAPGKGLEWVAVLWYDGINKNYADSVKGRFAISRDNSKNTLYLQMNSLRVEDTAVYFCVRVQGDYWGQGTLVTVSS

SEQ ID NO: 2007 - protein, 107 aa, synthetic construct
DIQMTQSPSSLSASVGDRVTITCRASQGIRNDLTWYQQKPGKAPKRLIYDTSSLQSGVPSRFSGSRSGTEFTLTISSLQPEDFASYFCLQHNIYPFTFGQGTKLEIK

SEQ ID NO: 2008 - protein, 113 aa, synthetic construct
EVQLVDSGGGLVEPGGSLRLSCAASGFTFSSYAMTWVRQAPGKGLEWVSGISGSGGVTDYADSVKGRFTISRDNSKNTLYMQMNSLRAEDTAVYYCAKDLGVWGKGTTVTVSS

SEQ ID NO: 2009 - protein, 112 aa, synthetic construct
DIVMTQTPLSSPVTLGQPASISCRSSQSLVHSDGNTYLNWLQQRPGQPPRLLIYKISNRFSGVPDRFSGSGAGTDFTLKISRVEAEDVGVYYCMQATQFPLTFGGGTKVEIK

SEQ ID NO: 2010 - protein, 117 aa, synthetic construct
EVQLVQSGAEVKKPGASVKVSCKASGYTFTGYFIHWVRQAPGQGLEWMGWINPNSGGTYYAQEFQGRVTMTRDTSISTAYMELIRLRSDDSAVYYCARDISLVGDYWGQGTLVTVSS

SEQ ID NO: 2011 - protein, 112 aa, synthetic construct
DVVMTQSPLSLPVTLGQPASISCRSSQSLVYSDGNTYLNWFQQRPGQSPRRLIYKVSNRDSGVPERFSGIGSGTDFTLEISRVEAEDVGVYYCMQGSHWPLTFGGGTKVEIK

SEQ ID NO: 2012 - protein, 113 aa, synthetic construct
EMQLVESGGGLVQPGGSLRLSCAASGFTFSSYAMNWVRQAPGKGLECVSGISGNGGRIYYAESVKGRFTISRDNSKSTFYLQMNSLRAEDTAVYYCAKDLDVWGKGTTVTVSS

SEQ ID NO: 2013 - protein, 112 aa, synthetic construct
DVVMTQTPLSSPVTLGQPASISCRSSQSLVHSDGNTYLNWLQQRPGQPPRLLIYKISNRFSGVPDRFSGSGAGTDFTLKISRVEAEDVGVYYCMQATQFPLTFGGGTKVEIK

SEQ ID NO: 2014 - protein, 113 aa, synthetic construct
EVQLVESGGGLVQPGGSLRLSCAASGFTFSSYAMNWVRQAPGKGLEWVSGISGNGGRIYYAESVKGRFTISRDNSKSTFYLQMNSLRAEDTAVYYCAKDLDVWGKGTTVTVSS

SEQ ID NO: 2015 - protein, 112 aa, synthetic construct; identical to SEQ ID NO: 2013

SEQ ID NO: 2016 - protein, 113 aa, synthetic construct
EVQLVESGGGLVQPGGSLRLSCAASGFTFSSYAMNWVRQAPGKGLESVSGISGNGGRIYYAESVKGRFTISRDNSKSTFYLQMNSLRAEDTAVYYCAKDLDVWGKGTTVTVSS

SEQ ID NO: 2017 - protein, 112 aa, synthetic construct; identical to SEQ ID NO: 2013

SEQ ID NO: 2018 - protein, 113 aa, synthetic construct
EVQLVESGGGLVQPGGSLRLSCAASGFTFSSYAMNWVRQAPGKGLECVSGISGNAGRIYYAESVKGRFTISRDNSKSTFYLQMNSLRAEDTAVYYCAKDLDVWGKGTTVTVSS

SEQ ID NO: 2019 - protein, 112 aa, synthetic construct; identical to SEQ ID NO: 2013

SEQ ID NO: 2020 - protein, 113 aa, synthetic construct
EVQLVESGGGLVQPGGSLRLSCAASGFTFSSYAMNWVRQAPGKGLECVSGISGNPGRIYYAESVKGRFTISRDNSKSTFYLQMNSLRAEDTAVYYCAKDLDVWGKGTTVTVSS

SEQ ID NO: 2021 - protein, 112 aa, synthetic construct; identical to SEQ ID NO: 2013

SEQ ID NO: 2022 - protein, 113 aa, synthetic construct
EVQLVESGGGLVQPGGSLRLSCAASGFTFSSYAMNWVRQAPGKGLECVSGISGQGGRIYYAESVKGRFTISRDNSKSTFYLQMNSLRAEDTAVYYCAKDLDVWGKGTTVTVSS

SEQ ID NO: 2023 - protein, 112 aa, synthetic construct; identical to SEQ ID NO: 2013

SEQ ID NO: 2024 - protein, 113 aa, synthetic construct
EVQLVESGGGLVQPGGSLRLSCAASGFTFSSYAMNWVRQAPGKGLECVSGISGSGGRIYYAESVKGRFTISRDNSKSTFYLQMNSLRAEDTAVYYCAKDLDVWGKGTTVTVSS

SEQ ID NO: 2025 - protein, 112 aa, synthetic construct; identical to SEQ ID NO: 2013

SEQ ID NO: 2026 - protein, 113 aa, synthetic construct
EVQLVESGGGLVQPGGSLRLSCAASGFTFSSYAMNWVRQAPGKGLECVSGISGNGGRIYYAESVKGRFTISRDNSKSTLYLQMNSLRAEDTAVYYCAKDLDVWGQGTTVTVSS

SEQ ID NO: 2027 - protein, 112 aa, synthetic construct; identical to SEQ ID NO: 2013

SEQ ID NO: 2028 - protein, 113 aa, synthetic construct
EVQLVESGGGLVQPGGSLRLSCAASGFTFSSYAMNWVRQAPGKGLECVSGISGNGGRIYYAESVKGRFTISRDNSKSTFYLQMNSLRAEDTAVYYCAKDLDVWGKGTTVTVSS

SEQ ID NO: 2029 - protein, 112 aa, synthetic construct; identical to SEQ ID NO: 2013

SEQ ID NO: 2030 - protein, 113 aa, synthetic construct
EVQLVESGGGLVQPGGSLRLSCAASGFTFSSYAMNWVRQAPGKGLECVSGISGNGGSIYYAESVKGRFTISRDNSKSTFYLQMNSLRAEDTAVYYCAKDLDVWGKGTTVTVSS

SEQ ID NO: 2031 - protein, 112 aa, synthetic construct; identical to SEQ ID NO: 2013

SEQ ID NO: 2032 - protein, 113 aa, synthetic construct
EVQLVESGGGLVQPGGSLRLSCAASGFTFSSYAMNWVRQAPGKGLECVSGISGNGGRIYYAESVKGRFTISRDNSKNTFYLQMNSLRAEDTAVYYCAKDLDVWGKGTTVTVSS

SEQ ID NO: 2033 - protein, 112 aa, synthetic construct; identical to SEQ ID NO: 2013

SEQ ID NO: 2034 - protein, 113 aa, synthetic construct; identical to SEQ ID NO: 2012

SEQ ID NO: 2035 - protein, 112 aa, synthetic construct
DVVMTQTPLSSPVTLGQPASISCRSSQSLVHSDANTYLNWLQQRPGQPPRLLIYKISNRFSGVPDRFSGSGAGTDFTLKISRVEAEDVGVYYCMQATQFPLTFGGGTKVEIK

SEQ ID NO: 2036 - protein, 113 aa, synthetic construct; identical to SEQ ID NO: 2012

SEQ ID NO: 2037 - protein, 112 aa, synthetic construct
DVVMTQTPLSSPVTLGQPASISCRSSQSLVHSDINTYLNWLQQRPGQPPRLLIYKISNRFSGVPDRFSGSGAGTDFTLKISRVEAEDVGVYYCMQATQFPLTFGGGTKVEIK

SEQ ID NO: 2038 - protein, 113 aa, synthetic construct; identical to SEQ ID NO: 2012

SEQ ID NO: 2039 - protein, 112 aa, synthetic construct
DVVMTQTPLSSPVTLGQPASISCRSSQSLVHSIGNTYLNWLQQRPGQPPRLLIYKISNRFSGVPDRFSGSGAGTDFTLKISRVEAEDVGVYYCMQATQFPLTFGGGTKVEIK

SEQ ID NO: 2040 - protein, 113 aa, synthetic construct; identical to SEQ ID NO: 2012

SEQ ID NO: 2041 - protein, 112 aa, synthetic construct
DVVMTQTPLSSPVTLGQPASISCRSSQSLVHSEGNTYLNWLQQRPGQPPRLLIYKISNRFSGVPDRFSGSGAGTDFTLKISRVEAEDVGVYYCMQATQFPLTFGGGTKVEIK

SEQ ID NO: 2042 - protein, 113 aa, synthetic construct; identical to SEQ ID NO: 2012

SEQ ID NO: 2043 - protein, 112 aa, synthetic construct
DVVMTQTPLSSPVTLGQPASISCRSSQSLVHSDGNTYLAWLQQRPGQPPRLLIYKISNRFSGVPDRFSGSGAGTDFTLKISRVEAEDVGVYYCMQATQFPLTFGGGTKVEIK

SEQ ID NO: 2044 - protein, 113 aa, synthetic construct; identical to SEQ ID NO: 2012

SEQ ID NO: 2045 - protein, 112 aa, synthetic construct
DVVMTQTPLSSPVTLGQPASISCRSSQSLVHSDGNTYLNWLQQRPGQPPRLLIYKISNRFSGVPDRFSGSGSGTDFTLKISRVEAEDVGVYYCMQATQFPLTFGGGTKVEIK

SEQ ID NO: 2046 - protein, 113 aa, synthetic construct; identical to SEQ ID NO: 2012

SEQ ID NO: 2047 - protein, 112 aa, synthetic construct
DVVMTQTPLSLPVTLGQPASISCRSSQSLVHSDGNTYLNWLQQRPGQPPRLLIYKISNRFSGVPDRFSGSGAGTDFTLKISRVEAEDVGVYYCMQATQFPLTFGGGTKVEIK

SEQ ID NO: 2048 - protein, 113 aa, synthetic construct; identical to SEQ ID NO: 2012

SEQ ID NO: 2049 - protein, 112 aa, synthetic construct
DVVMTQTPLSSPVTLGQPASISCRSSQSLVHSDGNTYLNWYQQRPGQPPRLLIYKISNRFSGVPDRFSGSGAGTDFTLKISRVEAEDVGVYYCMQATQFPLTFGGGTKVEIK

SEQ ID NO: 2050 - protein, 113 aa, synthetic construct; identical to SEQ ID NO: 2012

SEQ ID NO: 2051 - protein, 112 aa, synthetic construct
DVVMTQTPLSSPVTLGQPASISCRSSQSLVHSDGNTYLNWLQQRPGQPPRLLIYKASNRFSGVPDRFSGSGAGTDFTLKISRVEAEDVGVYYCMQATQFPLTFGGGTKVEIK

SEQ ID NO: 2052 - protein, 113 aa, synthetic construct
EMQLVESGGGLVQPGGSLRLSCAASGFTFSSYAMNWVRQAPGKGLESVSGISGNGGRIYYAESVKGRFTISRDNSKSTFYLQMNSLRAEDTAVYYCAKDLDVWGKGTTVTVSS

SEQ ID NO: 2053 - protein, 112 aa, synthetic construct; identical to SEQ ID NO: 2013

SEQ ID NO: 2054 - protein, 113 aa, synthetic construct
EMQLVESGGGLVQPGGSLRLSCAASGFTFSSYAMNWVRQAPGKGLEAVSGISGNGGRIYYAESVKGRFTISRDNSKSTFYLQMNSLRAEDTAVYYCAKDLDVWGKGTTVTVSS

SEQ ID NO: 2055 - protein, 112 aa, synthetic construct; identical to SEQ ID NO: 2013

SEQ ID NO: 2056 - protein, 113 aa, synthetic construct
EMQLVESGGGLVQPGGSLRLSCAASGFTFSSYAMNWVRQAPGKGLEGVSGISGNGGRIYYAESVKGRFTISRDNSKSTFYLQMNSLRAEDTAVYYCAKDLDVWGKGTTVTVSS

SEQ ID NO: 2057 - protein, 112 aa, synthetic construct; identical to SEQ ID NO: 2013

SEQ ID NO: 2058 - protein, 113 aa, synthetic construct
EMQLVESGGGLVQPGGSLRLSCAASGFTFSSYAMNWVRQAPGKGLEIVSGISGNGGRIYYAESVKGRFTISRDNSKSTFYLQMNSLRAEDTAVYYCAKDLDVWGKGTTVTVSS

SEQ ID NO: 2059 - protein, 112 aa, synthetic construct; identical to SEQ ID NO: 2013

SEQ ID NO: 2060 - protein, 113 aa, synthetic construct
EMQLVESGGGLVQPGGSLRLSCAASGFTFSSYAMNWVRQAPGKGLEPVSGISGNGGRIYYAESVKGRFTISRDNSKSTFYLQMNSLRAEDTAVYYCAKDLDVWGKGTTVTVSS

SEQ ID NO: 2061 - protein, 112 aa, synthetic construct; identical to SEQ ID NO: 2013

SEQ ID NO: 2062 - protein, 113 aa, synthetic construct
EMQLVESGGGLVQPGGSLRLSCAASGFTFSSYAMNWVRQAPGKGLETVSGISGNGGRIYYAESVKGRFTISRDNSKSTFYLQMNSLRAEDTAVYYCAKDLDVWGKGTTVTVSS

SEQ ID NO: 2063 - protein, 112 aa, synthetic construct; identical to SEQ ID NO: 2013

SEQ ID NO: 2064 - protein, 113 aa, synthetic construct
EIQLVESGGGLVQPGGSLRLSCAASGFTFSSYAMNWVRQAPGKGLECVSGISGNGGRIYYAESVKGRFTISRDNSKSTFYLQMNSLRAEDTAVYYCAKDLDVWGKGTTVTVSS

SEQ ID NO: 2065 - protein, 112 aa, synthetic construct; identical to SEQ ID NO: 2013

SEQ ID NO: 2066 - protein, 113 aa, synthetic construct
EAQLVESGGGLVQPGGSLRLSCAASGFTFSSYAMNWVRQAPGKGLECVSGISGNGGRIYYAESVKGRFTISRDNSKSTFYLQMNSLRAEDTAVYYCAKDLDVWGKGTTVTVSS

SEQ ID NO: 2067 - protein, 112 aa, synthetic construct; identical to SEQ ID NO: 2013

SEQ ID NO: 2068 - protein, 113 aa, synthetic construct
EMQLVESGGGLVQPGGSLRLSCAASGFTFSSYAMNWVRQAPGKGLESVSGISGNAGRIYYAESVKGRFTISRDNSKSTFYLQMNSLRAEDTAVYYCAKDLDVWGKGTTVTVSS

SEQ ID NO: 2069 - protein, 112 aa, synthetic construct; identical to SEQ ID NO: 2013

SEQ ID NO: 2070 - protein, 113 aa, synthetic construct; identical to SEQ ID NO: 2012

SEQ ID NO: 2071 - protein, 112 aa, synthetic construct
DVVMTQTPLSSPVTLGQSASISCRSSQSLVHSDGNTYLNWLHQRPGQPPRLLIYRISNRFSGVPDRFSGSGAGTDFTLKISRVEAEDVGVYYCMQATQFPLTFGGGTKLEIK

SEQ ID NO: 2072 - protein, 113 aa, synthetic construct; identical to SEQ ID NO: 2012

SEQ ID NO: 2073 - protein, 112 aa, synthetic construct
DVVMTQTPLSSPVTLGQSASISCRSSQSLVHSDGNTYLNWLHQRPGQPPRLLIYKASNRFSGVPDRFSGSGAGTDFTLKISRVEAEDVGVYYCMQATQFPLTFGGGTKLEIK

SEQ ID NO: 2074 - protein, 113 aa, synthetic construct; identical to SEQ ID NO: 2012

SEQ ID NO: 2075 - protein, 112 aa, synthetic construct
DVVMTQTPLSSPVTLGQSASISCRSSQSLVHSDGNTYLNWLHQRPGQPPRLLIYKNSNRFSGVPDRFSGSGAGTDFTLKISRVEAEDVGVYYCMQATQFPLTFGGGTKLEIK

SEQ ID NO: 2076 - protein, 113 aa, synthetic construct; identical to SEQ ID NO: 2012

SEQ ID NO: 2077 - protein, 112 aa, synthetic construct
DVVMTQTPLSSPVTLGQSASISCRSSQSLVHSDGNTYLNWLHQRPGQPPRLLIYKTSNRFSGVPDRFSGSGAGTDFTLKISRVEAEDVGVYYCMQATQFPLTFGGGTKLEIK

SEQ ID NO: 2078 - protein, 113 aa, synthetic construct; identical to SEQ ID NO: 2012

SEQ ID NO: 2079 - protein, 112 aa, synthetic construct
DVVMTQTPLSSPVTLGQSASISCRSSQSLVHSDGNTYLNWLHQRPGQPPRLLIYKVSNRFSGVPDRFSGSGAGTDFTLKISRVEAEDVGVYYCMQATQFPLTFGGGTKLEIK

SEQ ID NO: 2080 - protein, 113 aa, synthetic construct; identical to SEQ ID NO: 2012

SEQ ID NO: 2081 - protein, 112 aa, synthetic construct
DVVMTQTPLSSPVTLGQSASISCRSSQSLVHSDGNTYLNWLHQRPGQPPRLLIYKISNLFSGVPDRFSGSGAGTDFTLKISRVEAEDVGVYYCMQATQFPLTFGGGTKLEIK

SEQ ID NO: 2082 - protein, 113 aa, synthetic construct; identical to SEQ ID NO: 2012

SEQ ID NO: 2083 - protein, 112 aa, synthetic construct
DVVMTQTPLSSPVTLGQSASISCRSSQSLVHSDGNTYLNWLHQRPGQPPRLLIYKISNDFSGVPDRFSGSGAGTDFTLKISRVEAEDVGVYYCMQATQFPLTFGGGTKLEIK

SEQ ID NO: 2084 - protein, 113 aa, synthetic construct; identical to SEQ ID NO: 2012

SEQ ID NO: 2085 - protein, 112 aa, synthetic construct
DVVMTQTPLSSPVTLGQSASISCRSSQSLVHSDGNTYLNWLHQRPGQPPRLLIYKISNEFSGVPDRFSGSGAGTDFTLKISRVEAEDVGVYYCMQATQFPLTFGGGTKLEIK

SEQ ID NO: 2086 - protein, 113 aa, synthetic construct; identical to SEQ ID NO: 2012

SEQ ID NO: 2087 - protein, 112 aa, synthetic construct
DVVMTQTPLSSPVTLGQSASISCRSSQSLVHSDGNTYLNWLHQRPGQPPRLLIYKISNSFSGVPDRFSGSGAGTDFTLKISRVEAEDVGVYYCMQATQFPLTFGGGTKLEIK

SEQ ID NO: 2088 - protein, 113 aa, synthetic construct; identical to SEQ ID NO: 2012

SEQ ID NO: 2089 - protein, 112 aa, synthetic construct
DVVMTQTPLSSPVTLGQSASISCRSSQSLVHSDGNTYLNWLHQRPGQPPRLLIYKISNPFSGVPDRFSGSGAGTDFTLKISRVEAEDVGVYYCMQATQFPLTFGGGTKLEIK

SEQ ID NO: 2090 - protein, 113 aa, synthetic construct; identical to SEQ ID NO: 2012

SEQ ID NO: 2091 - protein, 112 aa, synthetic construct
DVVMTQTPLSSPVTLGQSASISCRSSQSLVHSDGNTYLNWLHQRPGQPPRLLIYKISNRPSGVPDRFSGSGAGTDFTLKISRVEAEDVGVYYCMQATQFPLTFGGGTKLEIK

SEQ ID NO: 2092 - protein, 113 aa, synthetic construct; identical to SEQ ID NO: 2012

SEQ ID NO: 2093 - protein, 112 aa, synthetic construct
DVVMTQTPLSSPVTLGQSASISCRSSQSLVHSDGNTYLNWLHQRPGQPPRLLIYKISNRASGVPDRFSGSGAGTDFTLKISRVEAEDVGVYYCMQATQFPLTFGGGTKLEIK

SEQ ID NO: 2094 - protein, 113 aa, synthetic construct; identical to SEQ ID NO: 2012

SEQ ID NO: 2095 - protein, 112 aa, synthetic construct
DVVMTQTPLSSPVTLGQSASISCRSSQSLVHSDGNTYLNWLHQRPGQPPRLLIYKISNRGSGVPDRFSGSGAGTDFTLKISRVEAEDVGVYYCMQATQFPLTFGGGTKLEIK

SEQ ID NO: 2096 - protein, 113 aa, synthetic construct; identical to SEQ ID NO: 2012

SEQ ID NO: 2097 - protein, 112 aa, synthetic construct
DVVMTQTPLSSPVTLGQSASISCRSSQSLVHSDGNTYLNWLHQRPGQPPRLLIYKISNRSSGVPDRFSGSGAGTDFTLKISRVEAEDVGVYYCMQATQFPLTFGGGTKLEIK

SEQ ID NO: 2098 - protein, 113 aa, synthetic construct; identical to SEQ ID NO: 2012

SEQ ID NO: 2099 - protein, 112 aa, synthetic construct
DVVMTQTPLSSPVTLGQSASISCRSSQSLVHSDGNTYLNWLHQRPGQPPRLLIYKISNRNSGVPDRFSGSGAGTDFTLKISRVEAEDVGVYYCMQATQFPLTFGGGTKLEIK

SEQ ID NO: 2100 - protein, 113 aa, synthetic construct; identical to SEQ ID NO: 2012

SEQ ID NO: 2101 - protein, 112 aa, synthetic construct
DVVMTQTPLSSPVTLGQSASISCRSSQSLVHSDGNTYLNWLHQRPGQPPRLLIYKISNRQSGVPDRFSGSGAGTDFTLKISRVEAEDVGVYYCMQATQFPLTFGGGTKLEIK

SEQ ID NO: 2102 - protein, 113 aa, synthetic construct; identical to SEQ ID NO: 2012

SEQ ID NO: 2103 - protein, 112 aa, synthetic construct
DVVMTQTPLSSPVTLGQSASISCRSSQSLVHSDGNTYLNWLHQRPGQPPRLLIYKISNRESGVPDRFSGSGAGTDFTLKISRVEAEDVGVYYCMQATQFPLTFGGGTKLEIK

SEQ ID NO: 2104 - protein, 113 aa, synthetic construct; identical to SEQ ID NO: 2012

SEQ ID NO: 2105 - protein, 112 aa, synthetic construct
DVVMTQTPLSSPVTLGQSASISCRSSQSLVHSDGNTYLNWLHQRPGQPPRLLIYKISNRDSGVPDRFSGSGAGTDFTLKISRVEAEDVGVYYCMQATQFPLTFGGGTKLEIK

SEQ ID NO: 2106 - protein, 113 aa, synthetic construct; identical to SEQ ID NO: 2012

SEQ ID NO: 2107 - protein, 112 aa, synthetic construct
DVVMTQTPLSSPVTLGQSASISCRSSQSLVHSDGNTYLNWLHQRPGQPPRLLIYKISNRFPGVPDRFSGSGAGTDFTLKISRVEAEDVGVYYCMQATQFPLTFGGGTKLEIK

SEQ ID NO: 2108 - protein, 113 aa, synthetic construct; identical to SEQ ID NO: 2012

SEQ ID NO: 2109 - protein, 112 aa, synthetic construct
DVVMTQTPLSSPVTLGQSASISCRSSQSLVHSDGNTYLNWLHQRPGQPPRLLIYKISNRFSPVPDRFSGSGAGTDFTLKISRVEAEDVGVYYCMQATQFPLTFGGGTKLEIK

SEQ ID NO: 2110 - protein, 113 aa, synthetic construct; identical to SEQ ID NO: 2012

SEQ ID NO: 2111 - protein, 112 aa, synthetic construct
DVVMTQTPLSSPVTLGQSASISCRSSQSLVHSDGNTYLNWLHQRPGQPPRLLIYKISNRFSGVPDRFSGSGAGTDFTLKISRVEAEDVGVYYCNQATQFPLTFGGGTKLEIK

SEQ ID NO: 2112 - protein, 113 aa, synthetic construct; identical to SEQ ID NO: 2012

SEQ ID NO: 2113 - protein, 112 aa, synthetic construct
DVVMTQTPLSSPVTLGQSASISCRSSQSLVHSDGNTYLNWLHQRPGQPPRLLIYKISNRFSGVPDRFSGSGAGTDFTLKISRVEAEDVGVYYCWQATQFPLTFGGGTKLEIK

SEQ ID NO: 2114 - protein, 113 aa, synthetic construct; identical to SEQ ID NO: 2012

SEQ ID NO: 2115 - protein, 112 aa, synthetic construct
DVVMTQTPLSSPVTLGQSASISCRSSQSLVHSDGNTYLNWLHQRPGQPPRLLIYKISNRFSGVPDRFSGSGAGTDFTLKISRVEAEDVGVYYCMQGTQFPLTFGGGTKLEIK

SEQ ID NO: 2116 - protein, 113 aa, synthetic construct; identical to SEQ ID NO: 2012

SEQ ID NO: 2117 - protein, 112 aa, synthetic construct
DVVMTQTPLSSPVTLGQSASISCRSSQSLVHSDGNTYLNWLHQRPGQPPRLLIYKISNRFSGVPDRFSGSGAGTDFTLKISRVEAEDVGVYYCMQNTQFPLTFGGGTKLEIK

SEQ ID NO: 2118 - protein, 113 aa, synthetic construct; identical to SEQ ID NO: 2012

SEQ ID NO: 2119 - protein, 112 aa, synthetic construct
DVVMTQTPLSSPVTLGQSASISCRSSQSLVHSDGNTYLNWLHQRPGQPPRLLIYKISNRFSGVPDRFSGSGAGTDFTLKISRVEAEDVGVYYCMQATQSPLTFGGGTKLEIK

SEQ ID NO: 2120 - protein, 113 aa, synthetic construct; identical to SEQ ID NO: 2012

SEQ ID NO: 2121 - protein, 112 aa, synthetic construct
DVVMTQTPLSSPVTLGQSASISCRSSQSLVHSDGNTYLNWLHQRPGQPPRLLIYKISNRFSGVPDRFSGSGAGTDFTLKISRVEAEDVGVYYCMQATQTPLTFGGGTKLEIK

SEQ ID NO: 2122 - protein, 113 aa, synthetic construct; identical to SEQ ID NO: 2012

SEQ ID NO: 2123 - protein, 112 aa, synthetic construct
DVVMTQTPLSSPVTLGQSASISCRSSQSLVHSDGNTYLNWLHQRPGQPPRLLIYKISNRFSGVPDRFSGSGAGTDFTLKISRVEAEDVGVYYCMQATQYPLTFGGGTKLEIK

SEQ ID NO: 2124 - protein, 113 aa, synthetic construct; identical to SEQ ID NO: 2012

SEQ ID NO: 2125 - protein, 112 aa, synthetic construct
DVVMTQTPLSSPVTLGQSASISCRSSQSLVHSDGNTYLNWLHQRPGQPPRLLIYKISNRFSGVPDRFSGSGAGTDFTLKISRVEAEDVGVYYCMQATQNPLTFGGGTKLEIK

SEQ ID NO: 2126 - protein, 113 aa, synthetic construct; identical to SEQ ID NO: 2012

SEQ ID NO: 2127 - protein, 112 aa, synthetic construct
DVVMTQTPLSSPVTLGQSASISCRSSQSLVHSDGNTYLNWLHQRPGQPPRLLIYKISNRFSGVPDRFSGSGAGTDFTLKISRVEAEDVGVYYCMQATQLPLTFGGGTKLEIK

SEQ ID NO: 2128 - protein, 113 aa, synthetic construct; identical to SEQ ID NO: 2012

SEQ ID NO: 2129 - protein, 112 aa, synthetic construct
DVVMTQTPLSSPVTLGQSASISCRSSQSLVHSDGNTYLNWLHQRPGQPPRLLIYKISNRFSGVPDRFSGSGAGTDFTLKISRVEAEDVGVYYCMQATQAPLTFGGGTKLEIK

SEQ ID NO: 2130 - protein, 113 aa, synthetic construct; identical to SEQ ID NO: 2012

SEQ ID NO: 2131 - protein, 112 aa, synthetic construct
DVVMTQTPLSSPVTLGQSASISCRSSQSLVHSDGNTYLNWLHQRPGQPPRLLIYKISNRFSGVPDRFSGSGAGTDFTLKISRVEAEDVGVYYCMQATQFNLTFGGGTKLEIK

SEQ ID NO: 2132 - protein, 113 aa, synthetic construct; identical to SEQ ID NO: 2012

SEQ ID NO: 2133 - protein, 112 aa, synthetic construct
DVVMTQTPLSSPVTLGQSASISCRSSQSLVHSDGNTYLNWLHQRPGQPPRLLIYKISNRFSGVPDRFSGSGAGTDFTLKISRVEAEDVGVYYCMQATQFQLTFGGGTKLEIK

SEQ ID NO: 2134 - protein, 113 aa, synthetic construct; identical to SEQ ID NO: 2012

SEQ ID NO: 2135 - protein, 112 aa, synthetic construct
DVVMTQTPLSSPVTLGQSASISCRSSQSLVHSDGNTYLNWLHQRPGQPPRLLIYKISNRFSGVPDRFSGSGAGTDFTLKISRVEAEDVGVYYCMQATQFDLTFGGGTKLEIK

SEQ ID NO: 2136 - protein, 113 aa, synthetic construct; identical to SEQ ID NO: 2012

SEQ ID NO: 2137 - protein, 112 aa, synthetic construct
DVVMTQTPLSSPVTLGQSASISCRSSQSLVHSDGNTYLNWLHQRPGQPPRLLIYKISNRFSGVPDRFSGSGAGTDFTLKISRVEAEDVGVYYCMQATQFSLTFGGGTKLEIK

SEQ ID NO: 2138 - protein, 113 aa, synthetic construct; identical to SEQ ID NO: 2012

SEQ ID NO: 2139 - protein, 112 aa, synthetic construct
DVVMTQTPLSSPVTLGQSASISCRSSQSLVHSDGNTYLNWLHQRPGQPPRLLIYKISNRFSGVPDRFSGSGAGTDFTLKISRVEAEDVGVYYCMQATQFPSTFGGGTKLEIK

SEQ ID NO: 2140 - protein, 113 aa, synthetic construct; identical to SEQ ID NO: 2012

SEQ ID NO: 2141 - protein, 112 aa, synthetic construct
DVVMTQTPLSSPVTLGQSASISCRSSQSLVHSDGNTYLNWLHQRPGQPPRLLIYKISNRFSGVPDRFSGSGAGTDFTLKISRVEAEDVGVYYCMQATQFPGTFGGGTKLEIK

SEQ ID NO: 2142 - protein, 113 aa, synthetic construct; identical to SEQ ID NO: 2012

SEQ ID NO: 2143 - protein, 112 aa, synthetic construct
DVVMTQTPLSSPVTLGQSASISCRSSQSLVHSDGNTYLNWLHQRPGQPPRLLIYKISNRFSGVPDRFSGSGAGTDFTLKISRVEAEDVGVYYCMQATQFPYTFGGGTKLEIK

SEQ ID NO: 2144 - protein, 113 aa, synthetic construct; identical to SEQ ID NO: 2012

SEQ ID NO: 2145 - protein, 112 aa, synthetic construct
DVVMTQTPLSSPVTLGQSASISCRSSQSLVHSDGNTYLNWLHQRPGQPPRLLIYKISNRFSGVPDRFSGSGAGTDFTLKISRVEAEDVGVYYCMQATQFPWTFGGGTKLEIK

SEQ ID NO: 2146 - protein, 113 aa, synthetic construct; identical to SEQ ID NO: 2012

SEQ ID NO: 2147 - protein, 112 aa, synthetic construct
DVVMTQTPLSSPVTLGQSASISCRSSQSLVHSDGNTYLNWLHQRPGQPPRLLIYKISNRFSGVPDRFSGSGAGTDFTLKISRVEAEDVGVYYCMQATQFSLPFGGGTKLEIK

SEQ ID NO: 2148 - protein, 113 aa, synthetic construct
EMQLVESGGGLVQPGGSLRLSCAASGFTFSSYAMNWVRQAPGKGLEGVSGISGSGGRIYYAESVKGRFTISRDNSKSTFYLQMNSLRAEDTAVYYCAKDLDVWGKGTTVTVSS

SEQ ID NO: 2149 - protein, 112 aa, synthetic construct; identical to SEQ ID NO: 2013

SEQ ID NO: 2150 - protein, 113 aa, synthetic construct
EVQLVESGGGLVQPGGSLRLSCAASGFTFSSYAMNWVRQAPGKGLEGVSGISGNGGRIYYAESVKGRFTISRDNSKSTFYLQMNSLRAEDTAVYYCAKDLDVWGKGTTVTVSS

SEQ ID NO: 2151 - protein, 112 aa, synthetic construct; identical to SEQ ID NO: 2013

SEQ ID NO: 2152 - protein, 113 aa, synthetic construct
EVQLVESGGGLVQPGGSLRLSCAASGFTFSSYAMNWVRQAPGKGLEGVSGISGSGGRIYYAESVKGRFTISRDNSKSTFYLQMNSLRAEDTAVYYCAKDLDVWGKGTTVTVSS

SEQ ID NO: 2153 - protein, 112 aa, synthetic construct; identical to SEQ ID NO: 2013

SEQ ID NO: 2154 - protein, 113 aa, synthetic construct; identical to SEQ ID NO: 2056

SEQ ID NO: 2155 - protein, 112 aa, synthetic construct; identical to SEQ ID NO: 2035

SEQ ID NO: 2156 - protein, 113 aa, synthetic construct; identical to SEQ ID NO: 2148

SEQ ID NO: 2157 - protein, 112 aa, synthetic construct; identical to SEQ ID NO: 2035

SEQ ID NO: 2158 - protein, 113 aa, synthetic construct; identical to SEQ ID NO: 2028

SEQ ID NO: 2159 - protein, 112 aa, synthetic construct; identical to SEQ ID NO: 2035

SEQ ID NO: 2160 - protein, 113 aa, synthetic construct; identical to SEQ ID NO: 2024

SEQ ID NO: 2161 - protein, 112 aa, synthetic construct; identical to SEQ ID NO: 2035

SEQ ID NO: 2162 - protein, 113 aa, synthetic construct; identical to SEQ ID NO: 2150

SEQ ID NO: 2163 - protein, 112 aa, synthetic construct; identical to SEQ ID NO: 2035

SEQ ID NO: 2164 - protein, 113 aa, synthetic construct; identical to SEQ ID NO: 2152

SEQ ID NO: 2165 - protein, 112 aa, synthetic construct; identical to SEQ ID NO: 2035

SEQ ID NO: 2166 - protein, 113 aa, synthetic construct; identical to SEQ ID NO: 2012

SEQ ID NO: 2167 - protein, 112 aa, synthetic construct
DVVMTQTPLSSPVTLGQPASISCRSSQSLVHSDANTYLNWLQQRPGQPPRLLIYKISNRFSGVPDRFSGSGSGTDFTLKISRVEAEDVGVYYCMQATQFPLTFGGGTKVEIK

SEQ ID NO: 2168 - protein, 113 aa, synthetic construct; identical to SEQ ID NO: 2056

SEQ ID NO: 2169 - protein, 112 aa, synthetic construct; identical to SEQ ID NO: 2167

SEQ ID NO: 2170 - protein, 113 aa, synthetic construct; identical to SEQ ID NO: 2148

SEQ ID NO: 2171 - protein, 112 aa, synthetic construct; identical to SEQ ID NO: 2167

SEQ ID NO: 2172 - protein, 113 aa, synthetic construct; identical to SEQ ID NO: 2028

SEQ ID NO: 2173 - protein, 112 aa, synthetic construct; identical to SEQ ID NO: 2167

SEQ ID NO: 2174 - protein, 113 aa, synthetic construct; identical to SEQ ID NO: 2024

SEQ ID NO: 2175 - protein, 112 aa, synthetic construct; identical to SEQ ID NO: 2167

SEQ ID NO: 2176 - protein, 113 aa, synthetic construct; identical to SEQ ID NO: 2150

SEQ ID NO: 2177 - protein, 112 aa, synthetic construct; identical to SEQ ID NO: 2167

SEQ ID NO: 2178 - protein, 113 aa, synthetic construct; identical to SEQ ID NO: 2152

SEQ ID NO: 2179 - protein, 112 aa, synthetic construct; identical to SEQ ID NO: 2167

SEQ ID NO: 2180 - protein, 113 aa, synthetic construct; identical to SEQ ID NO: 2012

SEQ ID NO: 2181 - protein, 112 aa, synthetic construct
DVVMTQTPLSSPVTLGQSASISCRSSQSLVHSDANTYLNWLHQRPGQPPRLLIYKISNRFSGVPDRFSGSGSGTDFTLKISRVEAEDVGVYYCMQATQFPLTFGGGTKLEIK

SEQ ID NO: 2182 - protein, 113 aa, synthetic construct; identical to SEQ ID NO: 2056

SEQ ID NO: 2183 - protein, 112 aa, synthetic construct; identical to SEQ ID NO: 2181

SEQ ID NO: 2184 - protein, 113 aa, synthetic construct; identical to SEQ ID NO: 2148

SEQ ID NO: 2185 - protein, 112 aa, synthetic construct; identical to SEQ ID NO: 2181

SEQ ID NO: 2186 - protein, 113 aa, synthetic construct; identical to SEQ ID NO: 2028

SEQ ID NO: 2187 - protein, 112 aa, synthetic construct; identical to SEQ ID NO: 2181

SEQ ID NO: 2188 - protein, 113 aa, synthetic construct; identical to SEQ ID NO: 2024

SEQ ID NO: 2189 - protein, 112 aa, synthetic construct; identical to SEQ ID NO: 2181

SEQ ID NO: 2190 - protein, 113 aa, synthetic construct; identical to SEQ ID NO: 2150

SEQ ID NO: 2191 - protein, 112 aa, synthetic construct; identical to SEQ ID NO: 2181

SEQ ID NO: 2192 - protein, 113 aa, synthetic construct; identical to SEQ ID NO: 2152

SEQ ID NO: 2193 - protein, 112 aa, synthetic construct; identical to SEQ ID NO: 2181

SEQ ID NO: 2194 - protein, 113 aa, synthetic construct
EVQLVESGGGLVQPGGSLRLSCAASGFTFSSYAMSWVRQAPGKGLEGVSGISGSGGRIYYAESVKGRFTISRDNSKSTFYLQMNSLRAEDTAVYYCAKDLDVWGKGTTVTVSS

SEQ ID NO: 2195 - protein, 112 aa, synthetic construct; identical to SEQ ID NO: 2013

SEQ ID NO: 2196 - protein, 113 aa, synthetic construct
EVQLVESGGGLVQPGGSLRLSCAASGFTFSSYAMHWVRQAPGKGLEGVSGISGSGGRIYYAESVKGRFTISRDNSKSTFYLQMNSLRAEDTAVYYCAKDLDVWGKGTTVTVSS

SEQ ID NO: 2197 - protein, 112 aa, synthetic construct; identical to SEQ ID NO: 2013

SEQ ID NO: 2198 - protein, 113 aa, synthetic construct
EVQLVESGGGLVQPGGSLRLSCAASGFTFSSYAMTWVRQAPGKGLEGVSGISGSGGRIYYAESVKGRFTISRDNSKSTFYLQMNSLRAEDTAVYYCAKDLDVWGKGTTVTVSS

SEQ ID NO: 2199 - protein, 112 aa, synthetic construct; identical to SEQ ID NO: 2013

SEQ ID NO: 2200 - protein, 113 aa, synthetic construct
EVQLVESGGGLVQPGGSLRLSCAASGFTFSSYAMNWVRQAPGRGLEGVSGISGSGGRIYYAESVKGRFTISRDNSKSTFYLQMNSLRAEDTAVYYCAKDLDVWGKGTTVTVSS

SEQ ID NO: 2201 - protein, 112 aa, synthetic construct; identical to SEQ ID NO: 2013

SEQ ID NO: 2202 - protein, 113 aa, synthetic construct
EVQLVESGGGLVQPGGSLRLSCAASGFTFSSYAMNWVRQAPGQGLEGVSGISGSGGRIYYAESVKGRFTISRDNSKSTFYLQMNSLRAEDTAVYYCAKDLDVWGKGTTVTVSS

SEQ ID NO: 2203 - protein, 112 aa, synthetic construct; identical to SEQ ID NO: 2013

SEQ ID NO: 2204 - protein, 113 aa, synthetic construct
EVQLVESGGGLVQPGGSLRLSCAASGFTFSSYAMNWVRQAPGEGLEGVSGISGSGGRIYYAESVKGRFTISRDNSKSTFYLQMNSLRAEDTAVYYCAKDLDVWGKGTTVTVSS

SEQ ID NO: 2205 - protein, 112 aa, synthetic construct; identical to SEQ ID NO: 2013

SEQ ID NO: 2206 - protein, 113 aa, synthetic construct
EVQLVESGGGLVQPGGSLRLSCAASGFTFSSYAMNWVRQAPGKGLEGVSGISGSGGRIYKAESVKGRFDISRDNSKSTFYLQMNSLRAEDTAVYYCAKDLDVWGKGTTVTVSS

SEQ ID NO: 2207 - protein, 112 aa, synthetic construct; identical to SEQ ID NO: 2013

SEQ ID NO: 2208 - protein, 113 aa, synthetic construct
EVQLVESGGGLVQPGGSLRLSCAASGFTFSSYAMNWVRQAPGKGLEGVSGISGSGGRIYYAESVKGRFMISRDNSKSTFYLQMNSLRAEDTAVYYCAKDLDVWGKGTTVTVSS

SEQ ID NO: 2209 - protein, 112 aa, synthetic construct; identical to SEQ ID NO: 2013

SEQ ID NO: 2210 - protein, 113 aa, synthetic construct
EVQLVESGGGLVQPGGSLRLSCAASGFTFSSYAMNWVRQAPGKGLEGVSGISGSGGRIYYAESVKGRFQISRDNSKSTFYLQMNSLRAEDTAVYYCAKDLDVWGKGTTVTVSS

SEQ ID NO: 2211 - protein, 112 aa, synthetic construct; identical to SEQ ID NO: 2013

SEQ ID NO: 2212 - protein, 113 aa, synthetic construct
EVQLVESGGGLVQPGGSLRLSCAASGFTFSSYAMNWVRQAPGKGLEGVSGISGSGGRIYYAESVKGRFTILRDNSKSTFYLQMNSLRAEDTAVYYCAKDLDVWGKGTTVTVSS

SEQ ID NO: 2213 - protein, 112 aa, synthetic construct; identical to SEQ ID NO: 2013

SEQ ID NO: 2214 - protein, 113 aa, synthetic construct
EVQLVESGGGLVQPGGSLRLSCAASGFTFSSYAMNWVRQAPGKGLEGVSGISGSGGRIYYAESVKGRFTIQRDNSKSTFYLQMNSLRAEDTAVYYCAKDLDVWGKGTTVTVSS

SEQ ID NO: 2215 - protein, 112 aa, synthetic construct; identical to SEQ ID NO: 2013

SEQ ID NO: 2216 - protein, 113 aa, synthetic construct
EVQLVESGGGLVQPGGSLRLSCAASGFTFSSYAMNWVRQAPGKGLEGVSGISGSGGRIYYAESVKGRFTINRDNSKSTFYLQMNSLRAEDTAVYYCAKDLDVWGKGTTVTVSS

SEQ ID NO: 2217 - protein, 112 aa, synthetic construct; identical to SEQ ID NO: 2013

SEQ ID NO: 2218 - protein, 113 aa, synthetic construct
EVQLVESGGGLVQPGGSLRLSCAASGFTFSSYAMNWVRQAPGKGLEGVSGISGSGGRIYYAESVKGRFTISRDNSKSTFYLQMNELRAEDTAVYYCAKDLDVWGKGTTVTVSS

SEQ ID NO: 2219 - protein, 112 aa, synthetic construct; identical to SEQ ID NO: 2013

SEQ ID NO: 2220 - protein, 113 aa, synthetic construct
EVQLVESGGGLVQPGGSLRLSCAASGFTFSSYAMNWVRQAPGKGLEGVSGISGSGGRIYYAESVKGRFTISRDNSKSTFYLQMNRLRAEDTAVYYCAKDLDVWGKGTTVTVSS

SEQ ID NO: 2221 - protein, 112 aa, synthetic construct; identical to SEQ ID NO: 2013

SEQ ID NO: 2222 - protein, 113 aa, synthetic construct
EVQLVESGGGLVQPGGSLRLSCAASGFTFSSYAMNWVRQAPGKGLEGVSGISGSGGRIYYAESVKGRFTISRDNSKSTFYLQMNTLRAEDTAVYYCAKDLDVWGKGTTVTVSS

SEQ ID NO: 2223 - protein, 112 aa, synthetic construct; identical to SEQ ID NO: 2013

SEQ ID NO: 2224 - protein, 113 aa, synthetic construct
EVQLVESGGGLVQPGGSLRLSCAASGFTFSDYAMNWVRQAPGKGLEGVSGISGSGGRIYYAESVKGRFTISRDNSKSTFYLQMNSLRAEDTAVYYCAKDLDVWGKGTTVTVSS

SEQ ID NO: 2225 - protein, 112 aa, synthetic construct; identical to SEQ ID NO: 2013

SEQ ID NO: 2226 - protein, 113 aa, synthetic construct
EVQLVESGGGLVQPGGSLRLSCAASGFTFSSYAMNWVRQAPGKGLEGVSGISGSGGAIYYAESVKGRFTISRDNSKSTFYLQMNSLRAEDTAVYYCAKDLDVWGKGTTVTVSS

SEQ ID NO: 2227 - protein, 112 aa, synthetic construct; identical to SEQ ID NO: 2013

SEQ ID NO: 2228 - protein, 113 aa, synthetic construct
EVQLVESGGGLVQPGGSLRLSCAASGFTFSSYAMNWVRQAPGKGLEGVSGISGSGGRAYYAESVKGRFTISRDNSKSTFYLQMNSLRAEDTAVYYCAKDLDVWGKGTTVTVSS

SEQ ID NO: 2229 - protein, 112 aa, synthetic construct; identical to SEQ ID NO: 2013

SEQ ID NO: 2230 - protein, 113 aa, synthetic construct
EVQLVESGGGLVQPGGSLRLSCAASGFTFSSYAMNWVRQAPGKGLEGVSGISGSGGSTYYAESVKGRFTISRDNSKSTFYLQMNSLRAEDTAVYYCAKDLDVWGKGTTVTVSS

SEQ ID NO: 2231 - protein, 112 aa, synthetic construct; identical to SEQ ID NO: 2013

SEQ ID NO: 2232 - protein, 113 aa, synthetic construct
EVQLVESGGGLVQPGGSLRLSCAASGFTFSSYAMNWVRQAPGKGLEGVSGISGSGGRIFYAESVKGRFTISRDNSKSTFYLQMNSLRAEDTAVYYCAKDLDVWGKGTTVTVSS

SEQ ID NO: 2233 - protein, 112 aa, synthetic construct; identical to SEQ ID NO: 2013

SEQ ID NO: 2234 - protein, 113 aa, synthetic construct
EVQLVESGGGLVQPGGSLRLSCAASGFTFSSYAMNWVRQAPGKGLEGVSGISGSGGRIHYAESVKGRFTISRDNSKSTFYLQMNSLRAEDTAVYYCAKDLDVWGKGTTVTVSS

SEQ ID NO: 2235 - protein, 112 aa, synthetic construct; identical to SEQ ID NO: 2013

SEQ ID NO: 2236 - protein, 113 aa, synthetic construct
EVQLVESGGGLVQPGGSLRLSCAASGFTFSSYAMNWVRQAPGKGLEGVSGISGSGGRINYAESVKGRFTISRDNSKSTFYLQMNSLRAEDTAVYYCAKDLDVWGKGTTVTVSS

SEQ ID NO: 2237 - protein, 112 aa, synthetic construct; identical to SEQ ID NO: 2013

SEQ ID NO: 2238 - protein, 113 aa, synthetic construct
EVQLVESGGGLVQPGGSLRLSCAASGFTFSSYAMNWVRQAPGKGLEGVSGISGSGGRIKYAESVKGRFTISRDNSKSTFYLQMNSLRAEDTAVYYCAKDLDVWGKGTTVTVSS

SEQ ID NO: 2239 - protein, 112 aa, synthetic construct; identical to SEQ ID NO: 2013

SEQ ID NO: 2240 - protein, 113 aa, synthetic construct
EVQLVESGGGLVQPGGSLRLSCAASGFTFSSYAMNWVRQAPGKGLEGVSGISGSGGRIDYAESVKGRFTISRDNSKSTFYLQMNSLRAEDTAVYYCAKDLDVWGKGTTVTVSS

SEQ ID NO: 2241 - protein, 112 aa, synthetic construct; identical to SEQ ID NO: 2013

SEQ ID NO: 2242 - protein, 113 aa, synthetic construct
EVQLVESGGGLVQPGGSLRLSCAASGFTFSSYAMNWVRQAPGKGLEGVSGISGSGGRIAYAESVKGRFTISRDNSKSTFYLQMNSLRAEDTAVYYCAKDLDVWGKGTTVTVSS

SEQ ID NO: 2243 - protein, 112 aa, synthetic construct; identical to SEQ ID NO: 2013

SEQ ID NO: 2244 - protein, 113 aa, synthetic construct
EVQLVESGGGLVQPGGSLRLSCAASGFTFSSYAMNWVRQAPGKGLEGVSGISGSGGRIYFAESVKGRFTISRDNSKSTFYLQMNSLRAEDTAVYYCAKDLDVWGKGTTVTVSS

SEQ ID NO: 2245 - protein, 112 aa, synthetic construct; identical to SEQ ID NO: 2013

SEQ ID NO: 2246 - protein, 113 aa, synthetic construct
EVQLVESGGGLVQPGGSLRLSCAASGFTFSSYAMNWVRQAPGKGLEGVSGISGSGGRIYHAESVKGRFTISRDNSKSTFYLQMNSLRAEDTAVYYCAKDLDVWGKGTTVTVSS

SEQ ID NO: 2247 - protein, 112 aa, synthetic construct; identical to SEQ ID NO: 2013

SEQ ID NO: 2248 - protein, 113 aa, synthetic construct
EVQLVESGGGLVQPGGSLRLSCAASGFTFSSYAMNWVRQAPGKGLEGVSGISGSGGRIYPAESVKGRFTISRDNSKSTFYLQMNSLRAEDTAVYYCAKDLDVWGKGTTVTVSS

SEQ ID NO: 2249 - protein, 112 aa, synthetic construct; identical to SEQ ID NO: 2013

SEQ ID NO: 2250 - protein, 113 aa, synthetic construct
EVQLVESGGGLVQPGGSLRLSCAASGFTFSSYAMNWVRQAPGKGLEGVSGISGSGGRIYAAESVKGRFTISRDNSKSTFYLQMNSLRAEDTAVYYCAKDLDVWGKGTTVTVSS

SEQ ID NO: 2251 - protein, 112 aa, synthetic construct; identical to SEQ ID NO: 2013

SEQ ID NO: 2252 - protein, 113 aa, synthetic construct
EVQLVESGGGLVQPGGSLKLSCVASGFTFSSYAMNWVRQAPGKGLEGVSGISGSGGRIYYAESVKGRFTISRDNSKSTFYLQMNSLRAEDTAVYYCAKDLDVWGKGTTVTVSS

SEQ ID NO: 2253 - protein, 112 aa, synthetic construct; identical to SEQ ID NO: 2013

SEQ ID NO: 2254 - protein, 113 aa, synthetic construct
EVQLVESGGGLVQPGGSLKLSCVASGFTFSSYAMNWVRQAPGKGLEGVCGISGSGGRIYYAESVKGRFTCSRDNSKSTFYLQMNSLRAEDTAVYYCAKDLDVWGKGTTVTVSS

SEQ ID NO: 2255 - protein, 112 aa, synthetic construct; identical to SEQ ID NO: 2013

SEQ ID NO: 2256 - protein, 113 aa, synthetic construct
EVQLVESGGGLVQPGGSLKLSCVASGFTFSSYAMNWVRQAPGKGLEGVCGISGSGGRIYSAESVKGRFTCSRDNSKSTFYLQMNSLRAEDTAVYYCAKDLDVWGKGTTVTVSS

SEQ ID NO: 2257 - protein, 112 aa, synthetic construct; identical to SEQ ID NO: 2013

SEQ ID NO: 2258 - protein, 113 aa, synthetic construct; identical to SEQ ID NO: 2056

SEQ ID NO: 2259 - protein, 112 aa, synthetic construct
DVVMTQTPLSSPVTLGQSASISCRSSQSLVHSDGNTYLNWLHQRPGQPPRLLIYKISNRFDGVPDRFSGSGAGTDFTLKISRVEAEDVGVYYCMQATQFPLTFGGGTKLEIK

SEQ ID NO: 2260 - protein, 113 aa, synthetic construct; identical to SEQ ID NO: 2056

SEQ ID NO: 2261 - protein, 112 aa, synthetic construct
DVVMTQTPLSSPVTLGQSASISCRSSQSLVHSDGNTYLNWLHQRPGQPPRLLIYKISNRFEGVPDRFSGSGAGTDFTLKISRVEAEDVGVYYCMQATQFPLTFGGGTKLEIK

SEQ ID NO: 2262 - protein, 113 aa, synthetic construct; identical to SEQ ID NO: 2056

SEQ ID NO: 2263 - protein, 112 aa, synthetic construct
DVVMTQTPLSSPVTLGQSASISCRSSQSLVHSDGNTYLNWLHQRPGQPPRLLIYKISNRFQGVPDRFSGSGAGTDFTLKISRVEAEDVGVYYCMQATQFPLTFGGGTKLEIK

SEQ ID NO: 2264 - protein, 113 aa, synthetic construct; identical to SEQ ID NO: 2056

SEQ ID NO: 2265 - protein, 112 aa, synthetic construct
DVVMTQTPLSSPVTLGQSASISCRSSQSLVHSDGNTYLNWLHQRPGQPPRLLIYKISNRFSGVPDRFTGSGAGTDFTLKISRVEAEDVGVYYCMQATQFPLTFGGGTKLEIK

SEQ ID NO: 2266 - protein, 113 aa, synthetic construct; identical to SEQ ID NO: 2056

SEQ ID NO: 2267 - protein, 112 aa, synthetic construct
DVVMTQTPLSSPVTLGQSASISCRSSQSLVHSDGNTYLNWLHQRPGQPPRLLIYKISNRFSGVPDRFQGSGAGTDFTLKISRVEAEDVGVYYCMQATQFPLTFGGGTKLEIK

SEQ ID NO: 2268 - protein, 113 aa, synthetic construct; identical to SEQ ID NO: 2056

SEQ ID NO: 2269 - protein, 112 aa, synthetic construct
DVVMTQTPLSSPVTLGQSASISCRSSQSLVHSDGNTYLNWLHQRPGQPPRLLIYKISNRFSGVPDRFGGSGAGTDFTLKISRVEAEDVGVYYCMQATQFPLTFGGGTKLEIK

SEQ ID NO: 2270 - protein, 113 aa, synthetic construct; identical to SEQ ID NO: 2056

SEQ ID NO: 2271 - protein, 112 aa, synthetic construct
DVVMTQTPLSSPVTLGQSASISCRSSQSLVHSDGNTYLNWLHQRPGQPPRLLIYKISNRFSGVPDRFSGSGAGTDFTLTISRVEAEDVGVYYCMQATQFPLTFGGGTKLEIK

SEQ ID NO: 2272 - protein, 113 aa, synthetic construct; identical to SEQ ID NO: 2056

SEQ ID NO: 2273 - protein, 112 aa, synthetic construct
DVVMTQTPLSSPVTLGQSASISCRSSQSLVHSDGNTYLNWLHQRPGQPPRLLIYKISNRFSGVPDRFSGSGAGTDFTLRISRVEAEDVGVYYCMQATQFPLTFGGGTKLEIK

SEQ ID NO: 2274 - protein, 113 aa, synthetic construct; identical to SEQ ID NO: 2056

SEQ ID NO: 2275 - protein, 112 aa, synthetic construct
DVVMTQTPLSSPVTLGQSASISCRSSQSLVHSDGNTYLNWLHQRPGQPPRLLIYKISNRFSGVPDRFSGSGAGTDFTLEISRVEAEDVGVYYCMQATQFPLTFGGGTKLEIK

SEQ ID NO: 2276 - protein, 113 aa, synthetic construct; identical to SEQ ID NO: 2056

SEQ ID NO: 2277 - protein, 112 aa, synthetic construct
DVVMTQTPLSSPVTLGQSASISCRSSQSLVHSDGNTYLNWLHQRPGQPPRLLIYKIDNRFSGVPDRFSGSGAGTDFTLKISRVEAEDVGVYYCMQATQFPLTFGGGTKLEIK

SEQ ID NO: 2278 - protein, 113 aa, synthetic construct; identical to SEQ ID NO: 2056

SEQ ID NO: 2279 - protein, 112 aa, synthetic construct
DVVMTQTPLSSAVLLGQSASISCRSSQSLVHSDGNTYLNWLHQRPGQPPRLLIYKIDNRFSGVPDRFSGSGAGTDFTLKISRVEAEDVGVYYCMQATQFPLTFGGGTKLEIK

SEQ ID NO: 2280 - protein, 113 aa, synthetic construct
EVQLVESGGGLVQPGGSLRLSCAASGFTFSSYAMNWVRQAPGKGLEGVSGISGSGGRAYYAESVKGRFQISRDNSKSTFYLQMNSLRAEDTAVYYCAKDLDVWGKGTTVTVSS

SEQ ID NO: 2281 - protein, 112 aa, synthetic construct; identical to SEQ ID NO: 2181

SEQ ID NO: 2282 - protein, 113 aa, synthetic construct
EVQLVESGGGLVQPGGSLRLSCAASGFTFSSYAMNWVRQAPGRGLEGVSGISGSGGRIYYAESVKGRFQISRDNSKSTFYLQMNSLRAEDTAVYYCAKDLDVWGKGTTVTVSS

SEQ ID NO: 2283 - protein, 112 aa, synthetic construct; identical to SEQ ID NO: 2181

SEQ ID NO: 2284 - protein, 113 aa, synthetic construct
EVQLVESGGGLVQPGGSLRLSCAASGFTFSDYAMNWVRQAPGKGLEGVSGISGSGGRIYYAESVKGRFQISRDNSKSTFYLQMNSLRAEDTAVYYCAKDLDVWGKGTTVTVSS

SEQ ID NO: 2285 - protein, 112 aa, synthetic construct; identical to SEQ ID NO: 2181

SEQ ID NO: 2286 - protein, 113 aa, synthetic construct
EVQLVESGGGLVQPGGSLRLSCAASGFTFSSYAMNWVRQAPGRGLEGVSGISGSGGRAYYAESVKGRFTISRDNSKSTFYLQMNSLRAEDTAVYYCAKDLDVWGKGTTVTVSS

SEQ ID NO: 2287 - protein, 112 aa, synthetic construct; identical to SEQ ID NO: 2181

SEQ ID NO: 2288 - protein, 113 aa, synthetic construct
EVQLVESGGGLVQPGGSLRLSCAASGFTFSDYAMNWVRQAPGKGLEGVSGISGSGGRAYYAESVKGRFTISRDNSKSTFYLQMNSLRAEDTAVYYCAKDLDVWGKGTTVTVSS

SEQ ID NO: 2289 - protein, 112 aa, synthetic construct; identical to SEQ ID NO: 2181

SEQ ID NO: 2290 - protein, 113 aa, synthetic construct
EVQLVESGGGLVQPGGSLRLSCAASGFTFSDYAMNWVRQAPGRGLEGVSGISGSGGRIYYAESVKGRFTISRDNSKSTFYLQMNSLRAEDTAVYYCAKDLDVWGKGTTVTVSS

SEQ ID NO: 2291 - protein, 112 aa, synthetic construct; identical to SEQ ID NO: 2181

SEQ ID NO: 2292 - protein, 113 aa, synthetic construct
EVQLVESGGGLVQPGGSLRLSCAASGFTFSDYAMNWVRQAPGRGLEGVSGISGSGGRAYYAESVKGRFTISRDNSKSTFYLQMNSLRAEDTAVYYCAKDLDVWGKGTTVTVSS

SEQ ID NO: 2293 - protein, 112 aa, synthetic construct; identical to SEQ ID NO: 2181

SEQ ID NO: 2294 - protein, 113 aa, synthetic construct; identical to SEQ ID NO: 2200

SEQ ID NO: 2295 - protein, 112 aa, synthetic construct; identical to SEQ ID NO: 2181

SEQ ID NO: 2296 - protein, 113 aa, synthetic construct; identical to SEQ ID NO: 2210

SEQ ID NO: 2297 - protein, 112 aa, synthetic construct; identical to SEQ ID NO: 2181

SEQ ID NO: 2298 - protein, 113 aa, synthetic construct; identical to SEQ ID NO: 2282

SEQ ID NO: 2299 - protein, 112 aa, synthetic construct; identical to SEQ ID NO: 2013

SEQ ID NO: 2300 - protein, 115 aa, synthetic construct
EVQLVESGGGVVQPGRSLRLSCAASGFTFSSYGMHWVRQAPGKGLEWVAVIWYDGSNKDYADSVKGRFTISRDNSKNTLYLQMNSLRAEDTAIYYCARPGEGDYWGQGTLVTVSS

SEQ ID NO: 2301 - protein, 107 aa, synthetic construct
DIQMTQSPSSLSASVGDRVTITCRASQGVRNDFGWFQQKPGKAPKRLIYGASSLQSGVPSRFSGSGSGTEFTLTISSLQPEDFATYYCLQQNSYPWTFGQGTKLEIK

SEQ ID NO: 2302 - protein, 115 aa, synthetic construct
EVQLVESGGGVVQPGRSLRLSCAASGFTFSSYGMHWVRQAPGKGLEWVAVIWYDASNKDYADSVKGRFTISRDNSKNTLYLQMNSLRAEDTAIYYCARPGEGDYWGQGTLVTVSS

SEQ ID NO: 2303 - protein, 107 aa, synthetic construct; identical to SEQ ID NO: 2301

SEQ ID NO: 2304 - protein, 115 aa, synthetic construct
EVQLVESGGGVVQPGRSLRLSCAASGFTFSSYGMHWVRQAPGKGLEWVAVIWYDPSNKDYADSVKGRFTISRDNSKNTLYLQMNSLRAEDTAIYYCARPGEGDYWGQGTLVTVSS

SEQ ID NO: 2305 - protein, 107 aa, synthetic construct; identical to SEQ ID NO: 2301

SEQ ID NO: 2306 - protein, 115 aa, synthetic construct
EVQLVESGGGVVQPGRSLRLSCAASGFTFSSYGMHWVRQAPGKGLEWVAVIWYEGSNKDYADSVKGRFTISRDNSKNTLYLQMNSLRAEDTAIYYCARPGEGDYWGQGTLVTVSS

SEQ ID NO: 2307 - protein, 107 aa, synthetic construct; identical to SEQ ID NO: 2301

SEQ ID NO: 2308 - protein, 115 aa, synthetic construct
EVQLVESGGGVVQPGRSLRLSCAASGFTFSSYGMHWVRQAPGKGLEWVAVIWYSGSNKDYADSVKGRFTISRDNSKNTLYLQMNSLRAEDTAIYYCARPGEGDYWGQGTLVTVSS

SEQ ID NO: 2309 - protein, 107 aa, synthetic construct; identical to SEQ ID NO: 2301

SEQ ID NO: 2310 - protein, 115 aa, synthetic construct
EVQLVESGGGVVQPGRSLRLSCAASGFTFSSYGMHWVRQAPGKGLEWVAVIWYDGSNKDYAPSVKGRFTISRDNSKNTLYLQMNSLRAEDTAIYYCARPGEGDYWGQGTLVTVSS

SEQ ID NO: 2311 - protein, 107 aa, synthetic construct; identical to SEQ ID NO: 2301

SEQ ID NO: 2312 - protein, 115 aa, synthetic construct
EVQLVESGGGVVQPGRSLRLSCAASGFTFSSYGMHWVRQAPGKGLEWVAVIWYDGSNKDYAQSVKGRFTISRDNSKNTLYLQMNSLRAEDTAIYYCARPGEGDYWGQGTLVTVSS

SEQ ID NO: 2313 - protein, 107 aa, synthetic construct; identical to SEQ ID NO: 2301

SEQ ID NO: 2314 - protein, 115 aa, synthetic construct
EVQLVESGGGVVQPGRSLRLSCAASGFTFSSYGMHWVRQAPGKGLEWVAVIWYDGSNKDYAESVKGRFTISRDNSKNTLYLQMNSLRAEDTAIYYCARPGEGDYWGQGTLVTVSS

SEQ ID NO: 2315 - protein, 107 aa, synthetic construct; identical to SEQ ID NO: 2301

SEQ ID NO: 2316 - protein, 115 aa, synthetic construct
EVQLVESGGGVVQPGRSLRLSCAASGFTFSSYGMHWVRQAPGKGLEWVAVIWYDGSNKDYADAVKGRFTISRDNSKNTLYLQMNSLRAEDTAIYYCARPGEGDYWGQGTLVTVSS

SEQ ID NO: 2317 - protein, 107 aa, synthetic construct; identical to SEQ ID NO: 2301

SEQ ID NO: 2318 - protein, 115 aa, synthetic construct
EVQLVESGGGVVQPGRSLRLSCAASGFTFSSYGMHWVRQAPGKGLEWVAVIWYDGSNKDYADSVKGRFTISRDNSKNTLYLQMNSLRAEDTAIYYCARDGEGDYWGQGTLVTVSS

SEQ ID NO: 2319 - protein, 107 aa, synthetic construct; identical to SEQ ID NO: 2301

SEQ ID NO: 2320 - protein, 115 aa, synthetic construct
EVQLVESGGGVVQPGGSLRLSCAASGFTFSSYGMHWVRQAPGKGLEWVAVIWYDGSNKDYADSVKGRFTISRDNSKNTLYLQMNSLRAEDTAIYYCARPGEGDYWGQGTLVTVSS

SEQ ID NO: 2321 - protein, 107 aa, synthetic construct; identical to SEQ ID NO: 2301

SEQ ID NO: 2322 - protein, 115 aa, synthetic construct
EVQLVESGGGVVQPGRSLRLSCAASGFTFSSYGMHWVRQAPGKGLEWVAVIWYDGSNKYYADSVKGRFTISRDNSKNTLYLQMNSLRAEDTAIYYCARPGEGDYWGQGTLVTVSS

SEQ ID NO: 2323 - protein, 107 aa, synthetic construct; identical to SEQ ID NO: 2301

SEQ ID NO: 2324 - protein, 115 aa, synthetic construct
EVQLVESGGGVVQPGRSLRLSCAASGFTFSSYGMHWVRQAPGKGLEWVAVIWYDGSSKDYADSVKGRFTISRDNSKNTLYLQMNSLRAEDTAIYYCARPGEGDYWGQGTLVTVSS

SEQ ID NO: 2325 - protein, 107 aa, synthetic construct; identical to SEQ ID NO: 2301

SEQ ID NO: 2326 - protein, 115 aa, synthetic construct
EVQLVESGGGVVQPGRSLRLSCAASGFTFSSYGMHWVRQAPGKGLEWVAVIWYDGSNKDYADSVKGRFTISRDNSKNTLYLQMNSLRAEDTAIYYCARPGYGDYWGQGTLVTVSS

SEQ ID NO: 2327 - protein, 107 aa, synthetic construct; identical to SEQ ID NO: 2301

SEQ ID NO: 2328 - protein, 115 aa, synthetic construct
EVQLVESGGGVVQPGRSLRLSCAASGFTFSSYGMHWVRQAPGKGLEWVAVIWYDGSNKDYADSVKGRFTISRDNSKNTLYLQMNSLRAEDTAIYYCARPGEGDYWGQGTKVTVSS

SEQ ID NO: 2329 - protein, 107 aa, synthetic construct; identical to SEQ ID NO: 2301

SEQ ID NO: 2330 - protein, 115 aa, synthetic construct; identical to SEQ ID NO: 2000

SEQ ID NO: 2331 - protein, 107 aa, synthetic construct; identical to SEQ ID NO: 2301

SEQ ID NO: 2332 - protein, 115 aa, synthetic construct
EVQLVESGGGVVQPGRSLRLSCAASGFTFSSYGMHWVRQAPGKGLEWVAVIWYDGSNKDYADSVKGRFTISRDNSKNTLYLQMNSLRAEDTAIYYCARPGEFDYWGQGTLVTVSS

SEQ ID NO: 2333 - protein, 107 aa, synthetic construct; identical to SEQ ID NO: 2301

SEQ ID NO: 2334 - protein, 115 aa, synthetic construct; identical to SEQ ID NO: 2300

SEQ ID NO: 2335 - protein, 107 aa, synthetic construct
DIQMTQSPSSLSASVGDRVTITCRASQGVRNDFGWFQQKPGKAPKLLIYGASSLQSGVPSRFSGSGSGTEFTLTISSLQPEDFATYYCLQQNSYPWTFGQGTKLEIK

SEQ ID NO: 2336 - protein, 115 aa, synthetic construct; identical to SEQ ID NO: 2300

SEQ ID NO: 2337 - protein, 107 aa, synthetic construct
DIQMTQSPSSLSASVGDRVTITCRASQGVRNDLGWFQQKPGKAPKRLIYGASSLQSGVPSRFSGSGSGTEFTLTISSLQPEDFATYYCLQQNSYPWTFGQGTKLEIK

SEQ ID NO: 2338 - protein, 115 aa, synthetic construct; identical to SEQ ID NO: 2300

SEQ ID NO: 2339 - protein, 107 aa, synthetic construct
DIQMTQSPSSLSASVGDRVTITCRASQGVRNDFGWFQQKPGKAPKRLIYGASSLQSGVPSRFSGSGSGTEFTLTISSLQPEDFATYYCQQQNSYPWTFGQGTKLEIK

SEQ ID NO: 2340 - protein, 115 aa, synthetic construct; identical to SEQ ID NO: 2300

SEQ ID NO: 2341 - protein, 107 aa, synthetic construct
DIQMTQSPSSLSASVGDRVTITCRASQGVSNDFGWFQQKPGKAPKRLIYGASSLQSGVPSRFSGSGSGTEFTLTISSLQPEDFATYYCLQQNSYPWTFGQGTKLEIK

SEQ ID NO: 2342 - protein, 115 aa, synthetic construct; identical to SEQ ID NO: 2300

SEQ ID NO: 2343 - protein, 107 aa, synthetic construct
DIQMTQSPSSLSASVGDRVTITCRASQGVRNDFGWFQQKPGKAPKRLIYGASSLQSGVPSRFSGSGSGTDFTLTISSLQPEDFATYYCLQQNSYPWTFGQGTKLEIK

SEQ ID NO: 2344 - protein, 115 aa, synthetic construct; identical to SEQ ID NO: 2300

SEQ ID NO: 2345 - protein, 107 aa, synthetic construct
DIQMTQSPSSLSASVGDRVTITCRASQGVRNDFGWFQQKPGKAPKRLIYGASSLQSGVPSRFSGSGSGTEFTLTISSLQPEDFATYYCLQYNSYPWTFGQGTKLEIK

SEQ ID NO: 2346 - protein, 115 aa, synthetic construct; identical to SEQ ID NO: 2300

SEQ ID NO: 2347 - protein, 107 aa, synthetic construct
DIQMTQSPSSLSASVGDRVTITCRASQGVRNDFGWFQQKPGKAPKRLIYGASSLQSGVPSRFSGSGSGTEFTLTISSLQPEDFATYYCLQQNSYPFTFGQGTKLEIK

SEQ ID NO: 2348 - protein, 115 aa, synthetic construct
EVQLVESGGGVVQPGRSLRLSCAASGFTFSSYGMHWVRQAPGKGLEWVAVIWYDASNKDYAESVKGRFTISRDNSKNTLYLQMNSLRAEDTAIYYCARPGEGDYWGQGTLVTVSS

SEQ ID NO: 2349 - protein, 107 aa, synthetic construct; identical to SEQ ID NO: 2301

SEQ ID NO: 2350 - protein, 115 aa, synthetic construct
EVQLVESGGGVVQPGRSLRLSCAASGFTFSSYGMHWVRQAPGKGLEWVAVIWYDASNKDYAPSVKGRFTISRDNSKNTLYLQMNSLRAEDTAIYYCARPGEGDYWGQGTLVTVSS

SEQ ID NO: 2351 - protein, 107 aa, synthetic construct; identical to SEQ ID NO: 2301

SEQ ID NO: 2352 - protein, 115 aa, synthetic construct
EVQLVESGGGVVQPGRSLRLSCKASGFTFSSYGMHWVRQAPGKGLEWVAVIWYDGSNKDYADSVKGRFTISRDNSKNTLYLQMNSLRAEDTAIYYCARPGEGDYWGQGTLVTVSS

SEQ ID NO: 2353 - protein, 107 aa, synthetic construct; identical to SEQ ID NO: 2301

SEQ ID NO: 2354 - protein, 115 aa, synthetic construct
EVQLVESGGGVVQPGRSLRLSCNASGFTFSSYGMHWVRQAPGKGLEWVAVIWYDGSNKDYADSVKGRFTISRDNSKNTLYLQMNSLRAEDTAIYYCARPGEGDYWGQGTLVTVSS

SEQ ID NO: 2355 - protein, 107 aa, synthetic construct; identical to SEQ ID NO: 2301

SEQ ID NO: 2356 - protein, 115 aa, synthetic construct
EVQLVESGGGVVQPGRSLRLSCQASGFTFSSYGMHWVRQAPGKGLEWVAVIWYDGSNKDYADSVKGRFTISRDNSKNTLYLQMNSLRAEDTAIYYCARPGEGDYWGQGTLVTVSS

SEQ ID NO: 2357 - protein, 107 aa, synthetic construct; identical to SEQ ID NO: 2301

SEQ ID NO: 2358 - protein, 115 aa, synthetic construct
EVQLVESGGGVVQPGRSLRLSCATSGFTFSSYGMHWVRQAPGKGLEWVAVIWYDGSNKDYADSVKGRFTISRDNSKNTLYLQMNSLRAEDTAIYYCARPGEGDYWGQGTLVTVSS

SEQ ID NO: 2359 - protein, 107 aa, synthetic construct; identical to SEQ ID NO: 2301

SEQ ID NO: 2360 - protein, 115 aa, synthetic construct
EVQLVESGGGVVQPGRSLRLSCAVSGFTFSSYGMHWVRQAPGKGLEWVAVIWYDGSNKDYADSVKGRFTISRDNSKNTLYLQMNSLRAEDTAIYYCARPGEGDYWGQGTLVTVSS

SEQ ID NO: 2361 - protein, 107 aa, synthetic construct; identical to SEQ ID NO: 2301

SEQ ID NO: 2362 - protein, 115 aa, synthetic construct
EVQLVESGGGVVQPGRSLRLSCAASGFTFTSYGMHWVRQAPGKGLEWVAVIWYDGSNKDYADSVKGRFTISRDNSKNTLYLQMNSLRAEDTAIYYCARPGEGDYWGQGTLVTVSS

SEQ ID NO: 2363 - protein, 107 aa, synthetic construct; identical to SEQ ID NO: 2301

SEQ ID NO: 2364 - protein, 115 aa, synthetic construct
EVQLVESGGGVVQPGRSLRLSCAASGFTFNSYGMHWVRQAPGKGLEWVAVIWYDGSNKDYADSVKGRFTISRDNSKNTLYLQMNSLRAEDTAIYYCARPGEGDYWGQGTLVTVSS

SEQ ID NO: 2365 - protein, 107 aa, synthetic construct; identical to SEQ ID NO: 2301

SEQ ID NO: 2366 - protein, 115 aa, synthetic construct
EVQLVESGGGVVQPGRSLRLSCAASGFTFQSYGMHWVRQAPGKGLEWVAVIWYDGSNKDYADSVKGRFTISRDNSKNTLYLQMNSLRAEDTAIYYCARPGEGDYWGQGTLVTVSS

SEQ ID NO: 2367 - protein, 107 aa, synthetic construct; identical to SEQ ID NO: 2301

SEQ ID NO: 2368 - protein, 115 aa, synthetic construct
EVQLVESGGGVVQPGRSLRLSCAASGFTFWSYGMHWVRQAPGKGLEWVAVIWYDGSNKDYADSVKGRFTISRDNSKNTLYLQMNSLRAEDTAIYYCARPGEGDYWGQGTLVTVSS

SEQ ID NO: 2369 - protein, 107 aa, synthetic construct; identical to SEQ ID NO: 2301

SEQ ID NO: 2370 - protein, 115 aa, synthetic construct
EVQLVESGGGVVQPGRSLRLSCAASGFTFSSYAMHWVRQAPGKGLEWVAVIWYDGSNKDYADSVKGRFTISRDNSKNTLYLQMNSLRAEDTAIYYCARPGEGDYWGQGTLVTVSS

SEQ ID NO: 2371 - protein, 107 aa, synthetic construct; identical to SEQ ID NO: 2301

SEQ ID NO: 2372 - protein, 115 aa, synthetic construct
EVQLVESGGGVVQPGRSLRLSCAASGFTFSSYTMHWVRQAPGKGLEWVAVIWYDGSNKDYADSVKGRFTISRDNSKNTLYLQMNSLRAEDTAIYYCARPGEGDYWGQGTLVTVSS

SEQ ID NO: 2373 - protein, 107 aa, synthetic construct; identical to SEQ ID NO: 2301

SEQ ID NO: 2374 - protein, 115 aa, synthetic construct
EVQLVESGGGVVQPGRSLRLSCAASGFTFSSYNMHWVRQAPGKGLEWVAVIWYDGSNKDYADSVKGRFTISRDNSKNTLYLQMNSLRAEDTAIYYCARPGEGDYWGQGTLVTVSS

SEQ ID NO: 2375 - protein, 107 aa, synthetic construct; identical to SEQ ID NO: 2301

SEQ ID NO: 2376 - protein, 115 aa, synthetic construct
EVQLVESGGGVVQPGRSLRLSCAASGFTFSSYQMHWVRQAPGKGLEWVAVIWYDGSNKDYADSVKGRFTISRDNSKNTLYLQMNSLRAEDTAIYYCARPGEGDYWGQGTLVTVSS

SEQ ID NO: 2377 - protein, 107 aa, synthetic construct; identical to SEQ ID NO: 2301

SEQ ID NO: 2378 - protein, 115 aa, synthetic construct
EVQLVESGGGVVQPGRSLRLSCAASGFTFSSYEMHWVRQAPGKGLEWVAVIWYDGSNKDYADSVKGRFTISRDNSKNTLYLQMNSLRAEDTAIYYCARPGEGDYWGQGTLVTVSS

SEQ ID NO: 2379 - protein, 107 aa, synthetic construct; identical to SEQ ID NO: 2301

SEQ ID NO: 2380 - protein, 115 aa, synthetic construct
EVQLVESGGGVVQPGRSLRLSCAASGFTFSSYRMHWVRQAPGKGLEWVAVIWYDGSNKDYADSVKGRFTISRDNSKNTLYLQMNSLRAEDTAIYYCARPGEGDYWGQGTLVTVSS

SEQ ID NO: 2381 - protein, 107 aa, synthetic construct; identical to SEQ ID NO: 2301

SEQ ID NO: 2382 - protein, 115 aa, synthetic construct
EVQLVESGGGVVQPGRSLRLSCAASGFTFSSYWMHWVRQAPGKGLEWVAVIWYDGSNKDYADSVKGRFTISRDNSKNTLYLQMNSLRAEDTAIYYCARPGEGDYWGQGTLVTVSS

SEQ ID NO: 2383 - protein, 107 aa, synthetic construct; identical to SEQ ID NO: 2301

SEQ ID NO: 2384 - protein, 115 aa, synthetic construct
EVQLVESGGGVVQPGRSLRLSCAASGFTFSSYPMHWVRQAPGKGLEWVAVIWYDGSNKDYADSVKGRFTISRDNSKNTLYLQMNSLRAEDTAIYYCARPGEGDYWGQGTLVTVSS

SEQ ID NO: 2385 - protein, 107 aa, synthetic construct; identical to SEQ ID NO: 2301

SEQ ID NO: 2386 - protein, 115 aa, synthetic construct
EVQLVESGGGVVQPGRSLRLSCAASGFTFSSYGMHWVRQAPGRGLEWVAVIWYDGSNKDYADSVKGRFTISRDNSKNTLYLQMNSLRAEDTAIYYCARPGEGDYWGQGTLVTVSS

SEQ ID NO: 2387 - protein, 107 aa, synthetic construct; identical to SEQ ID NO: 2301

SEQ ID NO: 2388 - protein, 115 aa, synthetic construct
EVQLVESGGGVVQPGRSLRLSCAASGFTFSSYGMHWVRQAPGQGLEWVAVIWYDGSNKDYADSVKGRFTISRDNSKNTLYLQMNSLRAEDTAIYYCARPGEGDYWGQGTLVTVSS

SEQ ID NO: 2389 - protein, 107 aa, synthetic construct; identical to SEQ ID NO: 2301

SEQ ID NO: 2390 - protein, 115 aa, synthetic construct
EVQLVESGGGVVQPGRSLRLSCAASGFTFSSYGMHWVRQAPGLGLEWVAVIWYDGSNKDYADSVKGRFTISRDNSKNTLYLQMNSLRAEDTAIYYCARPGEGDYWGQGTLVTVSS

SEQ ID NO: 2391 - protein, 107 aa, synthetic construct; identical to SEQ ID NO: 2301

SEQ ID NO: 2392 - protein, 115 aa, synthetic construct
EVQLVESGGGVVQPGRSLRLSCAASGFTFSSYGMHWVRQAPGEGLEWVAVIWYDGSNKDYADSVKGRFTISRDNSKNTLYLQMNSLRAEDTAIYYCARPGEGDYWGQGTLVTVSS

SEQ ID NO: 2393 - protein, 107 aa, synthetic construct; identical to SEQ ID NO: 2301

SEQ ID NO: 2394 - protein, 115 aa, synthetic construct
EVQLVESGGGVVQPGRSLRLSCAASGFTFSSYGMHWVRQAPGKRLEWVAVIWYDGSNKDYADSVKGRFTISRDNSKNTLYLQMNSLRAEDTAIYYCARPGEGDYWGQGTLVTVSS

SEQ ID NO: 2395 - protein, 107 aa, synthetic construct; identical to SEQ ID NO: 2301

SEQ ID NO: 2396 - protein, 115 aa, synthetic construct
EVQLVESGGGVVQPGRSLRLSCAASGFTFSSYGMHWVRQAPGKALEWVAVIWYDGSNKDYADSVKGRFTISRDNSKNTLYLQMNSLRAEDTAIYYCARPGEGDYWGQGTLVTVSS

SEQ ID NO: 2397 - protein, 107 aa, synthetic construct; identical to SEQ ID NO: 2301

SEQ ID NO: 2398 - protein, 115 aa, synthetic construct
EVQLVESGGGVVQPGRSLRLSCAASGFTFSSYGMHWVRQAPGKNLEWVAVIWYDGSNKDYADSVKGRFTISRDNSKNTLYLQMNSLRAEDTAIYYCARPGEGDYWGQGTLVTVSS

SEQ ID NO: 2399 - protein, 107 aa, synthetic construct; identical to SEQ ID NO: 2301

SEQ ID NO: 2400 - protein, 115 aa, synthetic construct
EVQLVESGGGVVQPGRSLRLSCAASGFTFSSYGMHWVRQAPGKGLEWVAVIWYDGSNTDYADSVKGRFTISRDNSKNTLYLQMNSLRAEDTAIYYCARPGEGDYWGQGTLVTVSS

SEQ ID NO: 2401 - protein, 107 aa, synthetic construct; identical to SEQ ID NO: 2301

SEQ ID NO: 2402 - protein, 115 aa, synthetic construct
EVQLVESGGGVVQPGRSLRLSCAASGFTFSSYGMHWVRQAPGKGLEWVAVIWYDGSNIDYADSVKGRFTISRDNSKNTLYLQMNSLRAEDTAIYYCARPGEGDYWGQGTLVTVSS

SEQ ID NO: 2403 - protein, 107 aa, synthetic construct; identical to SEQ ID NO: 2301

SEQ ID NO: 2404 - protein, 115 aa, synthetic construct
EVQLVESGGGVVQPGRSLRLSCAASGFTFSSYGMHWVRQAPGKGLEWVAVIWYDGSNNDYADSVKGRFTISRDNSKNTLYLQMNSLRAEDTAIYYCARPGEGDYWGQGTLVTVSS

SEQ ID NO: 2405 - protein, 107 aa, synthetic construct; identical to SEQ ID NO: 2301

SEQ ID NO: 2406 - protein, 115 aa, synthetic construct
EVQLVESGGGVVQPGRSLRLSCAASGFTFSSYGMHWVRQAPGKGLEWVAVIWYDGSNRDYADSVKGRFTISRDNSKNTLYLQMNSLRAEDTAIYYCARPGEGDYWGQGTLVTVSS

SEQ ID NO: 2407 - protein, 107 aa, synthetic construct; identical to SEQ ID NO: 2301

SEQ ID NO: 2408 - protein, 115 aa, synthetic construct
EVQLVESGGGVVQPGRSLRLSCAASGFTFSSYGMHWVRQAPGKGLEWVAVIWYDGSNKFYADSVKGRFTISRDNSKNTLYLQMNSLRAEDTAIYYCARPGEGDYWGQGTLVTVSS

SEQ ID NO: 2409 - protein, 107 aa, synthetic construct; identical to SEQ ID NO: 2301

SEQ ID NO: 2410 - protein, 115 aa, synthetic construct
EVQLVESGGGVVQPGRSLRLSCAASGFTFSSYGMHWVRQAPGKGLEWVAVIWYDGSNKNYADSVKGRFTISRDNSKNTLYLQMNSLRAEDTAIYYCARPGEGDYWGQGTLVTVSS

SEQ ID NO: 2411 - protein, 107 aa, synthetic construct; identical to SEQ ID NO: 2301

SEQ ID NO: 2412 - protein, 115 aa, synthetic construct
EVQLVESGGGVVQPGRSLRLSCAASGFTFSSYGMHWVRQAPGKGLEWVAVIWYDGSNKEYADSVKGRFTISRDNSKNTLYLQMNSLRAEDTAIYYCARPGEGDYWGQGTLVTVSS

SEQ ID NO: 2413 - protein, 107 aa, synthetic construct; identical to SEQ ID NO: 2301

SEQ ID NO: 2414 - protein, 115 aa, synthetic construct
EVQLVESGGGVVQPGRSLRLSCAASGFTFSSYGMHWVRQAPGKGLEWVAVIWYDGSNKDYADSVKGRFTITRDNSKNTLYLQMNSLRAEDTAIYYCARPGEGDYWGQGTLVTVSS

SEQ ID NO: 2415 - protein, 107 aa, synthetic construct; identical to SEQ ID NO: 2301

SEQ ID NO: 2416 - protein, 115 aa, synthetic construct
EVQLVESGGGVVQPGRSLRLSCAASGFTFSSYGMHWVRQAPGKGLEWVAVIWYDGSNKDYADSVKGRFTILRDNSKNTLYLQMNSLRAEDTAIYYCARPGEGDYWGQGTLVTVSS

SEQ ID NO: 2417 - protein, 107 aa, synthetic construct; identical to SEQ ID NO: 2301

SEQ ID NO: 2418 - protein, 115 aa, synthetic construct
EVQLVESGGGVVQPGRSLRLSCAASGFTFSSYGMHWVRQAPGKGLEWVAVIWYDGSNKDYADSVKGRFTINRDNSKNTLYLQMNSLRAEDTAIYYCARPGEGDYWGQGTLVTVSS

SEQ ID NO: 2419 - protein, 107 aa, synthetic construct; identical to SEQ ID NO: 2301

SEQ ID NO: 2420 - protein, 115 aa, synthetic construct
EVQLVESGGGVVQPGRSLRLSCAASGFTFSSYGMHWVRQAPGKGLEWVAVIWYDGSNKDYADSVKGRFTISRDNSKNTLYLQMNNLRAEDTAIYYCARPGEGDYWGQGTLVTVSS

SEQ ID NO: 2421 - protein, 107 aa, synthetic construct; identical to SEQ ID NO: 2301

SEQ ID NO: 2422 - protein, 115 aa, synthetic construct
EVQLVESGGGVVQPGRSLRLSCAASGFTFSSYGMHWVRQAPGKGLEWVAVIWYDGSNKDYADSVKGRFTISRDNSKNTLYLQMNILRAEDTAIYYCARPGEGDYWGQGTLVTVSS

SEQ ID NO: 2423 - protein, 107 aa, synthetic construct; identical to SEQ ID NO: 2301

SEQ ID NO: 2424 - protein, 115 aa, synthetic construct
EVQLVESGGGVVQPGRSLRLSCAASGFTFSSYGMHWVRQAPGKGLEWVAVIWYDGSNKDYADSVKGRFTISRDNSKNTLYLQMNELRAEDTAIYYCARPGEGDYWGQGTLVTVSS

SEQ ID NO: 2425 - protein, 107 aa, synthetic construct; identical to SEQ ID NO: 2301

SEQ ID NO: 2426 - protein, 115 aa, synthetic construct; identical to SEQ ID NO: 2300

SEQ ID NO: 2427 - protein, 107 aa, synthetic construct
DIQMTQSPSSLSASVGDRVTITCRASQIVRNDFGWFQQKPGKAPKRLIYGASSLQSGVPSRFSGSGSGTEFTLTISSLQPEDFATYYCLQQNSYPWTFGQGTKLEIK

SEQ ID NO: 2428 - protein, 115 aa, synthetic construct; identical to SEQ ID NO: 2300

SEQ ID NO: 2429 - protein, 107 aa, synthetic construct
DIQMTQSPSSLSASVGDRVTITCRASQSVRNDFGWFQQKPGKAPKRLIYGASSLQSGVPSRFSGSGSGTEFTLTISSLQPEDFATYYCLQQNSYPWTFGQGTKLEIK

SEQ ID NO: 2430 - protein, 115 aa, synthetic construct; identical to SEQ ID NO: 2300

SEQ ID NO: 2431 - protein, 107 aa, synthetic construct
DIQMTQSPSSLSASVGDRVTITCRASQGIRNDFGWFQQKPGKAPKRLIYGASSLQSGVPSRFSGSGSGTEFTLTISSLQPEDFATYYCLQQNSYPWTFGQGTKLEIK

SEQ ID NO: 2432 - protein, 115 aa, synthetic construct; identical to SEQ ID NO: 2300

SEQ ID NO: 2433 - protein, 107 aa, synthetic construct
DIQMTQSPSSLSASVGDRVTITCRASQGVRNEFGWFQQKPGKAPKRLIYGASSLQSGVPSRFSGSGSGTEFTLTISSLQPEDFATYYCLQQNSYPWTFGQGTKLEIK

SEQ ID NO: 2434 - protein, 115 aa, synthetic construct; identical to SEQ ID NO: 2300

SEQ ID NO: 2435 - protein, 107 aa, synthetic construct
DIQMTQSPSSLSASVGDRVTITCRASQGVRNLFGWFQQKPGKAPKRLIYGASSLQSGVPSRFSGSGSGTEFTLTISSLQPEDFATYYCLQQNSYPWTFGQGTKLEIK

SEQ ID NO: 2436 - protein, 115 aa, synthetic construct; identical to SEQ ID NO: 2300

SEQ ID NO: 2437 - protein, 107 aa, synthetic construct
DIQMTQSPSSLSASVGDRVTITCRASQGVRNYFGWFQQKPGKAPKRLIYGASSLQSGVPSRFSGSGSGTEFTLTISSLQPEDFATYYCLQQNSYPWTFGQGTKLEIK

SEQ ID NO: 2438 - protein, 115 aa, synthetic construct; identical to SEQ ID NO: 2300

SEQ ID NO: 2439 - protein, 107 aa, synthetic construct
DIQMTQSPSSLSASVGDRVTITCRASQGVRNDFGWFQQKPGQAPKRLIYGASSLQSGVPSRFSGSGSGTEFTLTISSLQPEDFATYYCLQQNSYPWTFGQGTKLEIK

SEQ ID NO: 2440 - protein, 115 aa, synthetic construct; identical to SEQ ID NO: 2300

SEQ ID NO: 2441 - protein, 107 aa, synthetic construct
DIQMTQSPSSLSASVGDRVTITCRASQGVRNDFGWFQQKPGTAPKRLIYGASSLQSGVPSRFSGSGSGTEFTLTISSLQPEDFATYYCLQQNSYPWTFGQGTKLEIK

SEQ ID NO: 2442 - protein, 115 aa, synthetic construct; identical to SEQ ID NO: 2300

SEQ ID NO: 2443 - protein, 107 aa, synthetic construct
DIQMTQSPSSLSASVGDRVTITCRASQGVRNDFGWFQQKPGRAPKRLIYGASSLQSGVPSRFSGSGSGTEFTLTISSLQPEDFATYYCLQQNSYPWTFGQGTKLEIK

SEQ ID NO: 2444 - protein, 115 aa, synthetic construct; identical to SEQ ID NO: 2300

SEQ ID NO: 2445 - protein, 107 aa, synthetic construct
DIQMTQSPSSLSASVGDRVTITCRASQGVRNDFGWFQQKPGKAPKRLIYGASQLQSGVPSRFSGSGSGTEFTLTISSLQPEDFATYYCLQQNSYPWTFGQGTKLEIK

SEQ ID NO: 2446 - protein, 115 aa, synthetic construct; identical to SEQ ID NO: 2300

SEQ ID NO: 2447 - protein, 107 aa, synthetic construct
DIQMTQSPSSLSASVGDRVTITCRASQGVRNDFGWFQQKPGKAPKRLIYGASNLQSGVPSRFSGSGSGTEFTLTISSLQPEDFATYYCLQQNSYPWTFGQGTKLEIK

SEQ ID NO: 2448 - protein, 115 aa, synthetic construct; identical to SEQ ID NO: 2300

SEQ ID NO: 2449 - protein, 107 aa, synthetic construct
DIQMTQSPSSLSASVGDRVTITCRASQGVRNDFGWFQQKPGKAPKRLIYGASTLQSGVPSRFSGSGSGTEFTLTISSLQPEDFATYYCLQQNSYPWTFGQGTKLEIK

SEQ ID NO: 2450 - protein, 115 aa, synthetic construct; identical to SEQ ID NO: 2300

SEQ ID NO: 2451 - protein, 107 aa, synthetic construct
DIQMTQSPSSLSASVGDRVTITCRASQGVRNDFGWFQQKPGKAPKRLIYGASSLQSGVPSRFSGSKSGTEFTLTISSLQPEDFATYYCLQQNSYPWTFGQGTKLEIK

SEQ ID NO: 2452 - protein, 115 aa, synthetic construct; identical to SEQ ID NO: 2300

SEQ ID NO: 2453 - protein, 107 aa, synthetic construct
DIQMTQSPSSLSASVGDRVTITCRASQGVRNDFGWFQQKPGKAPKRLIYGASSLQSGVPSRFSGSGSGTEFTLTISRLQPEDFATYYCLQQNSYPWTFGQGTKLEIK

SEQ ID NO: 2454 - protein, 115 aa, synthetic construct; identical to SEQ ID NO: 2300

SEQ ID NO: 2455 - protein, 107 aa, synthetic construct
DIQMTQSPSSLSASVGDRVTITCRASQGVRNDFGWFQQKPGKAPKRLIYGASSLQSGVPSRFSGSGSGTEFTLTISLLQPEDFATYYCLQQNSYPWTFGQGTKLEIK

SEQ ID NO: 2456 - protein, 115 aa, synthetic construct; identical to SEQ ID NO: 2300

SEQ ID NO: 2457 - protein, 107 aa, synthetic construct
DIQMTQSPSSLSASVGDRVTITCRASQGVRNDFGWFQQKPGKAPKRLIYGASSLQSGVPSRFSGSGSGTEFTLTISTLQPEDFATYYCLQQNSYPWTFGQGTKLEIK

SEQ ID NO: 2458 - protein, 115 aa, synthetic construct; identical to SEQ ID NO: 2300

SEQ ID NO: 2459 - protein, 107 aa, synthetic construct
DIQMTQSPSSLSASVGDRVTITCRASQGVRNDFGWFQQKPGKAPKRLIYGASSLQSGVPSRFSGSGSGTEFTLTISSLQPEDFADYYCLQQNSYPWTFGQGTKLEIK

SEQ ID NO: 2460 - protein, 115 aa, synthetic construct; identical to SEQ ID NO: 2300

SEQ ID NO: 2461 - protein, 107 aa, synthetic construct
DIQMTQSPSSLSASVGDRVTITCRASQGVRNDFGWFQQKPGKAPKRLIYGASSLQSGVPSRFSGSGSGTEFTLTISSLQPEDFAVYYCLQQNSYPWTFGQGTKLEIK

SEQ ID NO: 2462 - protein, 115 aa, synthetic construct; identical to SEQ ID NO: 2300

SEQ ID NO: 2463 - protein, 107 aa, synthetic construct
DIQMTQSPSSLSASVGDRVTITCRASQGVRNDFGWFQQKPGKAPKRLIYGASSLQSGVPSRFSGSGSGTEFTLTISSLQPEDFATYYCLQQNSYPWTFGQGTKVEIK

SEQ ID NO: 2464 - protein, 115 aa, synthetic construct
EVQLVESGGGVVQPGRSLRLSCAASGFTFSSYAMHWVRQAPGKGLEWVAVISYDGSNKYYADSVKGRFTISRDNSKNTLYLQMNSLRAEDTAVYYCARPGEGDYWGQGTLVTVSS

SEQ ID NO: 2465 - protein, 107 aa, synthetic construct; identical to SEQ ID NO: 2301

SEQ ID NO: 2466 - protein, 115 aa, synthetic construct
EVQLVESGGGVVQPGRSLRLSCAASGFTFSSYGMHWVRQVPGKGLEWVAVIWYDASNKDYAPSVKGRFTISRDNSKNTLYLQMNSLRAEDTAIYYCARPGEGDYWGQGTLVTVSS

SEQ ID NO: 2467 - protein, 107 aa, synthetic construct; identical to SEQ ID NO: 2301

SEQ ID NO: 2468 - protein, 115 aa, synthetic construct
EVQLVESGGGVVQPGRSLRLSCAASGFTFSSYGMHWVRQAPGKGLEWVAVIWYDASNKDYVPSVKGRFTISRDNSKNTLYLQMNSLRAEDTAIYYCARPGEGDYWGQGTLVTVSS

SEQ ID NO: 2469 - protein, 107 aa, synthetic construct; identical to SEQ ID NO: 2301

SEQ ID NO: 2470 - protein, 115 aa, synthetic construct
EVQLVESGGGVVQPGRSLRLSCAASGFTFSSYGMHWVRQAPGKGLEWVAVIWYDASNKDYAPSVKGRFTISRDNSKNTLYLQMNSLRAEDTAVYYCARPGEGDYWGQGTLVTVSS

SEQ ID NO: 2471 - protein, 107 aa, synthetic construct; identical to SEQ ID NO: 2301

SEQ ID NO: 2472 - protein, 115 aa, synthetic construct
EVQLVESGGGVVQPGRSLRLSCAASGFTFSSYGMHWVRQVPGKGLEWVAVIWYDASNKDYVPSVKGRFTISRDNSKNTLYLQMNSLRAEDTAIYYCARPGEGDYWGQGTLVTVSS

SEQ ID NO: 2473 - protein, 107 aa, synthetic construct; identical to SEQ ID NO: 2301

SEQ ID NO: 2474 - protein, 115 aa, synthetic construct
EVQLVESGGGVVQPGRSLRLSCAASGFTFSSYGMHWVRQVPGKGLEWVAVIWYDASNKDYAPSVKGRFTISRDNSKNTLYLQMNSLRAEDTAVYYCARPGEGDYWGQGTLVTVSS

SEQ ID NO: 2475 - protein, 107 aa, synthetic construct; identical to SEQ ID NO: 2301

SEQ ID NO: 2476 - protein, 115 aa, synthetic construct
EVQLVESGGGVVQPGRSLRLSCAASGFTFSSYGMHWVRQAPGKGLEWVAVIWYDASNKDYVPSVKGRFTISRDNSKNTLYLQMNSLRAEDTAVYYCARPGEGDYWGQGTLVTVSS

SEQ ID NO: 2477 - protein, 107 aa, synthetic construct; identical to SEQ ID NO: 2301

SEQ ID NO: 2478 - protein, 115 aa, synthetic construct
EVQLVESGGGVVQPGRSLRLSCAASGFTFSSYGMHWVRQVPGKGLEWVAVIWYDASNKDYVPSVKGRFTISRDNSKNTLYLQMNSLRAEDTAVYYCARPGEGDYWGQGTLVTVSS

SEQ ID NO: 2479 - protein, 107 aa, synthetic construct; identical to SEQ ID NO: 2301

SEQ ID NO: 2480 - protein, 115 aa, synthetic construct
EVQLVESGGGVVQPGRSLRLSCAASGFTFSVYGMHWVRQAPGKGLEWVAVIWYDASNKDYAPSVKGRFTISRDNSKNTLYLQMNSLRAEDTAIYYCARPGEGDYWGQGTLVTVSS

SEQ ID NO: 2481 - protein, 107 aa, synthetic construct; identical to SEQ ID NO: 2301

SEQ ID NO: 2482 - protein, 115 aa, synthetic construct
EVQLVESGGGVVQPGRSLRLSCAASGFTFSTYGMHWVRQAPGKGLEWVAVIWYDASNKDYAPSVKGRFTISRDNSKNTLYLQMNSLRAEDTAIYYCARPGEGDYWGQGTLVTVSS

SEQ ID NO: 2483 - protein, 107 aa, synthetic construct; identical to SEQ ID NO: 2301

SEQ ID NO: 2484 - protein, 115 aa, synthetic construct
EVQLVESGGGVVQPGRSLRLSCAASGFTFSSYGMNWVRQAPGKGLEWVAVIWYDASNKDYAPSVKGRFTISRDNSKNTLYLQMNSLRAEDTAIYYCARPGEGDYWGQGTLVTVSS

SEQ ID NO: 2485 - protein, 107 aa, synthetic construct; identical to SEQ ID NO: 2301

SEQ ID NO: 2486 - protein, 115 aa, synthetic construct
EVQLVESGGGVVQPGRSLRLSCAASGFTFSSYGMHWVRQAPGKGLEWVAIIWYDASNKDYAPSVKGRFTISRDNSKNTLYLQMNSLRAEDTAIYYCARPGEGDYWGQGTLVTVSS

SEQ ID NO: 2487 - protein, 107 aa, synthetic construct; identical to SEQ ID NO: 2301

SEQ ID NO: 2488 - protein, 115 aa, synthetic construct
EVQLVESGGGVVQPGRSLRLSCAASGFTFSSYGMHWVRQAPGKGLEWVAMIWYDASNKDYAPSVKGRFTISRDNSKNTLYLQMNSLRAEDTAIYYCARPGEGDYWGQGTLVTVSS

SEQ ID NO: 2489 - protein, 107 aa, synthetic construct; identical to SEQ ID NO: 2301

SEQ ID NO: 2490 - protein, 115 aa, synthetic construct
EVQLVESGGGVVQPGRSLRLSCAASGFTFSSYGMHWVRQAPGKGLEWVARIWYDASNKDYAPSVKGRFTISRDNSKNTLYLQMNSLRAEDTAIYYCARPGEGDYWGQGTLVTVSS

SEQ ID NO: 2491 - protein, 107 aa, synthetic construct; identical to SEQ ID NO: 2301

SEQ ID NO: 2492 - protein, 115 aa, synthetic construct
EVQLVESGGGVVQPGRSLRLSCAASGFTFSSYGMHWVRQAPGKGLEWVADIWYDASNKDYAPSVKGRFTISRDNSKNTLYLQMNSLRAEDTAIYYCARPGEGDYWGQGTLVTVSS

SEQ ID NO: 2493 - protein, 107 aa, synthetic construct; identical to SEQ ID NO: 2301

SEQ ID NO: 2494 - protein, 115 aa, synthetic construct
EVQLVESGGGVVQPGRSLRLSCAASGFTFSSYGMHWVRQAPGKGLEWVAEIWYDASNKDYAPSVKGRFTISRDNSKNTLYLQMNSLRAEDTAIYYCARPGEGDYWGQGTLVTVSS

SEQ ID NO: 2495 - protein, 107 aa, synthetic construct; identical to SEQ ID NO: 2301

SEQ ID NO: 2496 - protein, 115 aa, synthetic construct
EVQLVESGGGVVQPGRSLRLSCAASGFTFSSYGMHWVRQAPGKGLEWVAAIWYDASNKDYAPSVKGRFTISRDNSKNTLYLQMNSLRAEDTAIYYCARPGEGDYWGQGTLVTVSS

SEQ ID NO: 2497 - protein, 107 aa, synthetic construct; identical to SEQ ID NO: 2301

SEQ ID NO: 2498 - protein, 115 aa, synthetic construct
EVQLVESGGGVVQPGRSLRLSCAASGFTFSSYGMHWVRQAPGKGLEWVAVIWYDASNKDYAPSVKGRFTISRDNSKNTLYLQMNGLRAEDTAIYYCARPGEGDYWGQGTLVTVSS

SEQ ID NO: 2499 - protein, 107 aa, synthetic construct; identical to SEQ ID NO: 2301

SEQ ID NO: 2500 - protein, 115 aa, synthetic construct
EVQLVESGGGVVQPGRSLRLSCAASGFTFSSYGMHWVRQAPGKGLEWVAVIWYDASNKDYAPSVKGRFTISRDNSKNTLYLQMNRLRAEDTAIYYCARPGEGDYWGQGTLVTVSS

SEQ ID NO: 2501 - protein, 107 aa, synthetic construct; identical to SEQ ID NO: 2301

SEQ ID NO: 2502 - protein, 115 aa, synthetic construct
EVQLVESGGGVVQPGRSLRLSCAASGFTFSSYGMHWVRQAPGKGLEWVAVIWYDASNKDYAPSVKGRFTISRDNSKNTLYLQMNSLRAEDTAIYYCARPGEGDYWGRGTLVTVSS

SEQ ID NO: 2503 - protein, 107 aa, synthetic construct; identical to SEQ ID NO: 2301

SEQ ID NO: 2504 - protein, 115 aa, synthetic construct
EVQLVESGGGVVQPGRSLRLSCAASGFTFSSYGMHWVRQAPGKGLEWVAVIWYDASNKDYAPSVKGRFTISRDNSKNTLYLQMNSLRAEDTAIYYCARPGEGDYWGQGTTVTVSS

SEQ ID NO: 2505 - protein, 107 aa, synthetic construct; identical to SEQ ID NO: 2301

SEQ ID NO: 2506 - protein, 115 aa, synthetic construct
EVQLVESGGGVVQPGRSLRLSCAASGFTFSSYGMHWVRQAPGKGLEWVAVIWYDASNKDYAPSVKGRFTISRDNSKNTLYLQMNSLRAEDTAIYYCARPGEGDYWGQGTMVTVSS

SEQ ID NO: 2507 - protein, 107 aa, synthetic construct; identical to SEQ ID NO: 2301

SEQ ID NO: 2508 - protein, 115 aa, synthetic construct
EVQLVESGGGVVQPGRSLRLSCAASGFTFSSYGMHWVRDAPGKGLEWVAVIWYDASNKDYAPSVKGRFTISRDNSKNTLYLQMNSLRAEDTAIYYCARPGEGDYWGQGTLVTVSS

SEQ ID NO: 2509 - protein, 107 aa, synthetic construct
DIQMTQSPSSLSASVGDRVTITCRASQGVRNDFGWFQKKPGKAPKRLIYGASSLQSGVPSRFSGSGSGTEFTLTISSLQPEDFATYYCLQQNSYPWTFGQGTKLEIK

SEQ ID NO: 2510 - protein, 115 aa, synthetic construct
EVQLVESGGGVVQPGRSLRLSCAASGFTFSSYGMHWVRKAPGKGLEWVAVIWYDASNKDYAPSVKGRFTISRDNSKNTLYLQMNSLRAEDTAIYYCARPGEGDYWGQGTLVTVSS

SEQ ID NO: 2511 - protein, 107 aa, synthetic construct
DIQMTQSPSSLSASVGDRVTITCRASQGVRNDFGWFQDKPGKAPKRLIYGASSLQSGVPSRFSGSGSGTEFTLTISSLQPEDFATYYCLQQNSYPWTFGQGTKLEIK

SEQ ID NO: 2512 - protein, 115 aa, synthetic construct
EVQLVESGGGVVQPGRSLRLSCAASGFTFSSYGMHWVRCAPGKGLEWVAVIWYDASNKDYAPSVKGRFTISRDNSKNTLYLQMNSLRAEDTAIYYCARPGEGDYWGQGTLVTVSS

SEQ ID NO: 2513 - protein, 107 aa, synthetic construct
DIQMTQSPSSLSASVGDRVTITCRASQGVRNDFGWFQCKPGKAPKRLIYGASSLQSGVPSRFSGSGSGTEFTLTISSLQPEDFATYYCLQQNSYPWTFGQGTKLEIK

SEQ ID NO: 2514 - protein, 115 aa, synthetic construct
EVQLVESGGGVVQPGRSLRLSCAASGFTFSSYGMHWVRQAPGKGLEWVAVIWYDASNKDYAPSVKGRFTISRDNSKNTLYLQMNSLRAEDTAIYYCARPGEGDYWDQGTLVTVSS

SEQ ID NO: 2515 - protein, 107 aa, synthetic construct
DIQMTQSPSSLSASVGDRVTITCRASQGVRNDFGWFQQKPGKKPKRLIYGASSLQSGVPSRFSGSGSGTEFTLTISSLQPEDFATYYCLQQNSYPWTFGQGTKLEIK

SEQ ID NO: 2516 - protein, 115 aa, synthetic construct
EVQLVESGGGVVQPGRSLRLSCAASGFTFSSYGMHWVRQAPGKGLEWVAVIWYDASNKDYAPSVKGRFTISRDNSKNTLYLQMNSLRAEDTAIYYCARPGEGDYWKQGTLVTVSS

SEQ ID NO: 2517 - protein, 107 aa, synthetic construct
DIQMTQSPSSLSASVGDRVTITCRASQGVRNDFGWFQQKPGKDPKRLIYGASSLQSGVPSRFSGSGSGTEFTLTISSLQPEDFATYYCLQQNSYPWTFGQGTKLEIK

SEQ ID NO: 2518 - protein, 115 aa, synthetic construct
EVQLVESGGGVVQPGRSLRLSCAASGFTFSSYGMHWVRQAPGKGLEWVAVIWYDASNKDYAPSVKGRFTISRDNSKNTLYLQMNSLRAEDTAIYYCARPGEGDYWCQGTLVTVSS

SEQ ID NO: 2519 - protein, 107 aa, synthetic construct
DIQMTQSPSSLSASVGDRVTITCRASQGVRNDFGWFQQKPGKCPKRLIYGASSLQSGVPSRFSGSGSGTEFTLTISSLQPEDFATYYCLQQNSYPWTFGQGTKLEIK

SEQ ID NO: 2520 - protein, 115 aa, synthetic construct; identical to SEQ ID NO: 2350

SEQ ID NO: 2521 - protein, 107 aa, synthetic construct
DIQMTQSPSSLSASVGDRVTITCRASQGVRNDFGWFQQKPGKAPKRLIYGASSLQSGVPSRFSGSGSGTEFTLTISSLQPEDFATYYCLQKNSYPWTFGQGTKLEIK

SEQ ID NO: 2522 - protein, 115 aa, synthetic construct
EVQLVESGGGVVQPGRSLRLSCAASGFTFSSYGMHWVRQAPGKGLEWVAVIWYDASNKDYAPSVKGRFTISRDNSKNTLYLQMNSLRAEDTAIYYCARPGEGCYWGQGTLVTVSS

SEQ ID NO: 2523 - protein, 107 aa, synthetic construct
DIQMTQSPSSLSASVGDRVTITCRASQGVRNDFGWFQQKPGKAPKRLIYGASSLQSGVPSRFSGSGSGTEFTLTISSLQPEDFATYYCLQCNSYPWTFGQGTKLEIK

SEQ ID NO: 2524 - protein, 115 aa, synthetic construct
EVQLVESGGGVVQPGRSLRLSCAASGFTFSSYGMHWVRQAPGKGLEWVDVIWYDASNKDYAPSVKGRFTKSRDNSKNTLYLQMNSLRAEDTAIYYCARPGEGDYWGQGTLVTVSS

SEQ ID NO: 2525 - protein, 107 aa, synthetic construct; identical to SEQ ID NO: 2301

SEQ ID NO: 2526 - protein, 115 aa, synthetic construct
EVQLVESGGGVVQPGRSLRLSCAASGFTFSSYGMHWVRQAPGKGLEWVKVIWYDASNKDYAPSVKGRFTDSRDNSKNTLYLQMNSLRAEDTAIYYCARPGEGDYWGQGTLVTVSS

SEQ ID NO: 2527 - protein, 107 aa, synthetic construct; identical to SEQ ID NO: 2301

SEQ ID NO: 2528 - protein, 115 aa, synthetic construct
EVQLVESGGGVVQPGRSLRLSCAASGFTFSDYGMHWVRQAPGKGLEWVAVIWYDASNKDYAPSVKGRFTISRDNSKNTLYLQMNSLRAEDTAIYYCARPGEGDYWGQGTLVTVSS

SEQ ID NO: 2529 - protein, 107 aa, synthetic construct; identical to SEQ ID NO: 2301

SEQ ID NO: 2530 - protein, 115 aa, synthetic construct
EVQLVESGGGVVQPGRSLRLSCAASGFTFSSDGMHWVRQAPGKGLEWVAVIWYDASNKDYAPSVKGRFTISRDNSKNTLYLQMNSLRAEDTAIYYCARPGEGDYWGQGTLVTVSS

SEQ ID NO: 2531 - protein, 107 aa, synthetic construct; identical to SEQ ID NO: 2301

SEQ ID NO: 2532 - protein, 115 aa, synthetic construct
EVQLVESGGGVVQPGRSLKLSCAASGFTFSSYGMHWVRQAPGKGLEWVAVIWYDASNKDYAPSVKGRFTISRDNSKNTLYLQMNSLRAEDTAIYYCARPGEGDYWGQGTLVTVSS

SEQ ID NO: 2533 - protein, 107 aa, synthetic construct; identical to SEQ ID NO: 2301

SEQ ID NO: 2534 - protein, 115 aa, synthetic construct
EVQLVESGGGVVQPGRSLRLSCVASGFTFSSYGMHWVRQAPGKGLEWVAVIWYDASNKDYAPSVKGRFTISRDNSKNTLYLQMNSLRAEDTAIYYCARPGEGDYWGQGTLVTVSS

SEQ ID NO: 2535 - protein, 107 aa, synthetic construct; identical to SEQ ID NO: 2301

SEQ ID NO: 2536 - protein, 115 aa, synthetic construct
EVQLVESGGGVVQPGRSLKLSCVASGFTFSSYGMHWVRQAPGKGLEWVAVIWYDASNKDYAPSVKGRFTISRDNSKNTLYLQMNSLRAEDTAIYYCARPGEGDYWGQGTLVTVSS

SEQ ID NO: 2537 - protein, 107 aa, synthetic construct; identical to SEQ ID NO: 2301

SEQ ID NO: 2538 - protein, 115 aa, synthetic construct
EVQLVESGGGVVQPGRSLRLSCAASGFTFSSYGMHWVRQAPGKGLEWVCVIWYDASNKDYAPSVKGRFTCSRDNSKNTLYLQMNSLRAEDTAIYYCARPGEGDYWGQGTLVTVSS

SEQ ID NO: 2539 - protein, 107 aa, synthetic construct; identical to SEQ ID NO: 2301

SEQ ID NO: 2540 - protein, 115 aa, synthetic construct
EVQLVESGGGVVQPGRSLKLSCVASGFTFSSYGMHWVRQAPGKGLEWVCVIWYDASNKDYAPSVKGRFTCSRDNSKNTLYLQMNSLRAEDTAIYYCARPGEGDYWGQGTLVTVSS

SEQ ID NO: 2541 - protein, 107 aa, synthetic construct; identical to SEQ ID NO: 2301

SEQ ID NO: 2542 - protein, 115 aa, synthetic construct
EVQLVESGGGVVQPGRSLRLSCAASGFTFSSYGMHWVRQAPGKGLEWVAVIWYDASNKDYAPSVKGCFTISRDNSKNTLYLQMNSLRAECTAIYYCARPGEGDYWGQGTLVTVSS

SEQ ID NO: 2543 - protein, 107 aa, synthetic construct; identical to SEQ ID NO: 2301

SEQ ID NO: 2544 - protein, 115 aa, synthetic construct
EVQLVESGGGVVQPGRSLRLSCAASGFTFSSYGMHWVRQAPGKGLEWVAVIWYDASNKDYAPSVKGRFTISRDNSKNTLYLQMNSLRAEDTAIYYCARPGECDYWGQGTLVTVSS

SEQ ID NO: 2545 - protein, 107 aa, synthetic construct; identical to SEQ ID NO: 2301

SEQ ID NO: 2546 - protein, 115 aa, synthetic construct
EVQLVESGGGVVQPGRSLRLSCAASGFPFSSYGMHWVRQAPGKGLEWVAVIWYDASNKDYAPSVKGRFTISRDNSKNTLYLQMNSLRAEDTAIYYCARPGEGDYWGQGTLVTVSS

SEQ ID NO: 2547 - protein, 107 aa, synthetic construct; identical to SEQ ID NO: 2301

SEQ ID NO: 2548 - protein, 115 aa, synthetic construct
EVQLVESGGGVVQPGRSLRLSCAASGFTFPSYGMHWVRQAPGKGLEWVAVIWYDASNKDYAPSVKGRFTISRDNSKNTLYLQMNSLRAEDTAIYYCARPGEGDYWGQGTLVTVSS

SEQ ID NO: 2549 - protein, 107 aa, synthetic construct; identical to SEQ ID NO: 2301

SEQ ID NO: 2550 - protein, 115 aa, synthetic construct
EVQLVESGGGVVQPGRSLRLSCAASGFTFSPYGMHWVRQAPGKGLEWVAVIWYDASNKDYAPSVKGRFTISRDNSKNTLYLQMNSLRAEDTAIYYCARPGEGDYWGQGTLVTVSS

SEQ ID NO: 2551 - protein, 107 aa, synthetic construct; identical to SEQ ID NO: 2301

SEQ ID NO: 2552 - protein, 115 aa, synthetic construct
EVQLVESGGGVVQPGRSLRLSCAASGFTFSSYPMHWVRQAPGKGLEWVAVIWYDASNKDYAPSVKGRFTISRDNSKNTLYLQMNSLRAEDTAIYYCARPGEGDYWGQGTLVTVSS

SEQ ID NO: 2553 - protein, 107 aa, synthetic construct; identical to SEQ ID NO: 2301

SEQ ID NO: 2554 - protein, 115 aa, synthetic construct
EVQLVESGGGVVQPGRSLRLSCAASGFTFSSYGMHWVRQAPGKGLEWVAVIWYDAPNKDYAPSVKGRFTISRDNSKNTLYLQMNSLRAEDTAIYYCARPGEGDYWGQGTLVTVSS

SEQ ID NO: 2555 - protein, 107 aa, synthetic construct; identical to SEQ ID NO: 2301

SEQ ID NO: 2556 - protein, 115 aa, synthetic construct
EVQLVESGGGVVQPGRSLRLSCAASGFTFSSYGMHWVRQAPGKGLEWVAVISYDASNKDYAPSVKGRFTISRDNSKNTLYLQMNSLRAEDTAIYYCARPGEGDYWGQGTLVTVSS

SEQ ID NO: 2557 - protein, 107 aa, synthetic construct; identical to SEQ ID NO: 2301

SEQ ID NO: 2558 - protein, 115 aa, synthetic construct
EVQLVESGGGVVQPGRSLRLSCAASGFTFSSYGMHWVRQAPGKGLEWVAVINYDASNKDYAPSVKGRFTISRDNSKNTLYLQMNSLRAEDTAIYYCARPGEGDYWGQGTLVTVSS

SEQ ID NO: 2559 - protein, 107 aa, synthetic construct; identical to SEQ ID NO: 2301

SEQ ID NO: 2560 - protein, 115 aa, synthetic construct
EVQLVESGGGVVQPGRSLRLSCAASGFTFSSYGMHWVRQAPGKGLEWVAVIDYDASNKDYAPSVKGRFTISRDNSKNTLYLQMNSLRAEDTAIYYCARPGEGDYWGQGTLVTVSS

SEQ ID NO: 2561 - protein, 107 aa, synthetic construct; identical to SEQ ID NO: 2301

SEQ ID NO: 2562 - protein, 115 aa, synthetic construct
EVQLVESGGGVVQPGRSLRLSCAASGFTFSSYGMHWVRQAPGKGLEWVAVIRYDASNKDYAPSVKGRFTISRDNSKNTLYLQMNSLRAEDTAIYYCARPGEGDYWGQGTLVTVSS

SEQ ID NO: 2563 - protein, 107 aa, synthetic construct; identical to SEQ ID NO: 2301

SEQ ID NO: 2564 - protein, 115 aa, synthetic construct
EVQLVESGGGVVQPGRSLRLSCAASGFTFSSYGMHWVRQAPGKGLEWVAVIKYDASNKDYAPSVKGRFTISRDNSKNTLYLQMNSLRAEDTAIYYCARPGEGDYWGQGTLVTVSS

SEQ ID NO: 2565 - protein, 107 aa, synthetic construct; identical to SEQ ID NO: 2301

SEQ ID NO: 2566 - protein, 115 aa, synthetic construct
EVQLVESGGGVVQPGRSLRLSCAASGFTFSSYGMHWVRQAPGKGLEWVAVIAYDASNKDYAPSVKGRFTISRDNSKNTLYLQMNSLRAEDTAIYYCARPGEGDYWGQGTLVTVSS

SEQ ID NO: 2567 - protein, 107 aa, synthetic construct; identical to SEQ ID NO: 2301

SEQ ID NO: 2568 - protein, 115 aa, synthetic construct
EVQLVESGGGVVQPGRSLRLSCAASGFTFSSYGMHWVRQAPGKGLEWVAVIWDDASNKDYAPSVKGRFTISRDNSKNTLYLQMNSLRAEDTAIYYCARPGEGDYWGQGTLVTVSS

SEQ ID NO: 2569 - protein, 107 aa, synthetic construct; identical to SEQ ID NO: 2301

SEQ ID NO: 2570 - protein, 115 aa, synthetic construct
EVQLVESGGGVVQPGRSLRLSCAASGFTFSSYGMHWVRQAPGKGLEWVAVIWPDASNKDYAPSVKGRFTISRDNSKNTLYLQMNSLRAEDTAIYYCARPGEGDYWGQGTLVTVSS

SEQ ID NO: 2571 - protein, 107 aa, synthetic construct; identical to SEQ ID NO: 2301

SEQ ID NO: 2572 - protein, 115 aa, synthetic construct
EVQLVESGGGVVQPGRSLRLSCAASGFTFSSYGMHWVRQAPGKGLEWVAVIWNDASNKDYAPSVKGRFTISRDNSKNTLYLQMNSLRAEDTAIYYCARPGEGDYWGQGTLVTVSS

SEQ ID NO: 2573 - protein, 107 aa, synthetic construct; identical to SEQ ID NO: 2301

SEQ ID NO: 2574 - protein, 115 aa, synthetic construct
EVQLVESGGGVVQPGRSLRLSCAASGFTFSSYGMHWVRQAPGKGLEWVAVIWKDASNKDYAPSVKGRFTISRDNSKNTLYLQMNSLRAEDTAIYYCARPGEGDYWGQGTLVTVSS

SEQ ID NO: 2575 - protein, 107 aa, synthetic construct; identical to SEQ ID NO: 2301

SEQ ID NO: 2576 - protein, 115 aa, synthetic construct
EVQLVESGGGVVQPGRSLRLSCAASGFTFSSYGMHWVRQAPGKGLEWVAVIWGDASNKDYAPSVKGRFTISRDNSKNTLYLQMNSLRAEDTAIYYCARPGEGDYWGQGTLVTVSS

SEQ ID NO: 2577 - protein, 107 aa, synthetic construct; identical to SEQ ID NO: 2301

SEQ ID NO: 2578 - protein, 115 aa, synthetic construct
EVQLVESGGGVVQPGRSLRLSCAASGFTFSSYGMHWVRQAPGKGLEWVAVIWSDASNKDYAPSVKGRFTISRDNSKNTLYLQMNSLRAEDTAIYYCARPGEGDYWGQGTLVTVSS

SEQ ID NO: 2579 - protein, 107 aa, synthetic construct; identical to SEQ ID NO: 2301

SEQ ID NO: 2580 - protein, 115 aa, synthetic construct
EVQLVESGGGVVQPGRSLRLSCAASGFTFSSYGMHWVRQAPGKGLEWVAVIWYDASNKDYAPSVKGRFTISRDNSKNTLYLQMNSLRAEDTAIYYCARPGEGDVWGQGTLVTVSS

SEQ ID NO: 2581 - protein, 107 aa, synthetic construct; identical to SEQ ID NO: 2301

SEQ ID NO: 2582 - protein, 115 aa, synthetic construct
EVQLVESGGGVVQPGRSLRLSCAASGFTFSSYGMHWVRQAPGKGLEWVAVIWYDASNKDYAPSVKGRFTISRDNSKNTLYLQMNSLRAEDTAIYYCARPGEGDRWGQGTLVTVSS

SEQ ID NO: 2583 - protein, 107 aa, synthetic construct; identical to SEQ ID NO: 2301

SEQ ID NO: 2584 - protein, 115 aa, synthetic construct
EVQLVESGGGVVQPGRSLRLSCAASGFTFSSYGMHWVRQAPGKGLEWVAVIWYDASNKDYAPSVKGRFTISRDNSKNTLYLQMNSLRAEDTAIYYCARPGEGDPWGQGTLVTVSS

SEQ ID NO: 2585 - protein, 107 aa, synthetic construct; identical to SEQ ID NO: 2301

SEQ ID NO: 2586 - protein, 115 aa, synthetic construct
EVQLVESGGGVVQPGRSLRLSCAASGFTFSSYGMHWVRQAPGKGLEWVAVIWYDASNKDYAPSVKGRFTISRDNSKNTLYLQMNSLRAEDTAIYYCARPGEGDAWGQGTLVTVSS

SEQ ID NO: 2587 - protein, 107 aa, synthetic construct; identical to SEQ ID NO: 2301

SEQ ID NO: 2588 - protein, 115 aa, synthetic construct; identical to SEQ ID NO: 2350

SEQ ID NO: 2589 - protein, 107 aa, synthetic construct
DIQMTQSPSSLSASVGDRVTITCRASQGVRNDFGWFQQKPGKAPKRLIYGDSSLQSGVPSRFSGSGSGTEFTLTISSLQPEDFATYYCLQQNSYPWTFGQGTKLEIK

SEQ ID NO: 2590 - protein, 115 aa, synthetic construct; identical to SEQ ID NO: 2350

SEQ ID NO: 2591 - protein, 107 aa, synthetic construct
DIQMTQSPSSLSASVGDRVTITCRASQGVRNDFGWFQQKPGKAPKRLIYGADSLQSGVPSRFSGSGSGTEFTLTISSLQPEDFATYYCLQQNSYPWTFGQGTKLEIK

SEQ ID NO: 2592 - protein, 115 aa, synthetic construct; identical to SEQ ID NO: 2350

SEQ ID NO: 2593 - protein, 107 aa, synthetic construct
DIQMTQSPSSLSASVGDRVTITCRASQGVRNDFGWFQQKPGKAPKRLIYGDDSLQSGVPSRFSGSGSGTEFTLTISSLQPEDFATYYCLQQNSYPWTFGQGTKLEIK

SEQ ID NO: 2594 - protein, 115 aa, synthetic construct; identical to SEQ ID NO: 2350

SEQ ID NO: 2595 - protein, 107 aa, synthetic construct
DIQMTQSPSSLSASVGDRVTITCRASQGVRNDFGWYQQKPGKAPKRLIYGASSLQSGVPSRFSGSGSGTEFTLTISSLQPEDFATYYCLQQNSYPWTFGQGTKLEIK

SEQ ID NO: 2596 - protein, 115 aa, synthetic construct; identical to SEQ ID NO: 2350

SEQ ID NO: 2597 - protein, 107 aa, synthetic construct
DIQMTQSPSSLSASVGDRVTITCRASQGVRNDFGWFQQKPGKAPKRLIYAASSLQSGVPSRFSGSGSGTEFTLTISSLQPEDFATYYCLQQNSYPWTFGQGTKLEIK

SEQ ID NO: 2598 - protein, 115 aa, synthetic construct; identical to SEQ ID NO: 2350

SEQ ID NO: 2599 - protein, 107 aa, synthetic construct
DIQMTQSPSSLSASVGDRVTITCRASQGVRNDFGWFQQKPGKAPKRLCYGASSLQSGVPSRFSCSGSGTEFTLTISSLQPEDFATYYCLQQNSYPWTFGQGTKLEIK

SEQ ID NO: 2600 - protein, 115 aa, synthetic construct; identical to SEQ ID NO: 2350

SEQ ID NO: 2601 - protein, 107 aa, synthetic construct
DIQMTQSPSSLSASVGDRVTITCRASQGVRNDFGWFQQKPGKAPKRLDYGASSLQSGVPSRFSKSGSGTEFTLTISSLQPEDFATYYCLQQNSYPWTFGQGTKLEIK

SEQ ID NO: 2602 - protein, 115 aa, synthetic construct; identical to SEQ ID NO: 2350

SEQ ID NO: 2603 - protein, 107 aa, synthetic construct
DIQMTQSPSSLSASVGDRVTITCRASQGVRNDFGWFQQKPGKAPKRLKYGASSLQSGVPSRFSDSGSGTEFTLTISSLQPEDFATYYCLQQNSYPWTFGQGTKLEIK

SEQ ID NO: 2604 - protein, 115 aa, synthetic construct; identical to SEQ ID NO: 2350

SEQ ID NO: 2605 - protein, 107 aa, synthetic construct
DIQMTQSPSSLSASVGDRVTITCRASQGVRNDFGWFQQKPGKAPKRLIYGASSLCSGVPSRFSGSGSGTEFTLTISSLQPEDFATYYCLQQNSYPWTFGQGTKLEIK

SEQ ID NO: 2606 - protein, 115 aa, synthetic construct; identical to SEQ ID NO: 2350

SEQ ID NO: 2607 - protein, 107 aa, synthetic construct
DIQMTQSPSSLSASVGDRVTITCRASQGVRNDFGWFQQKPGKAPKRLIYDASSLQSGVPSRFSGSGSGTEFTLTISSLQPEDFATYYCLQQNSYPWTFGQGTKLEIK

SEQ ID NO: 2608 - protein, 115 aa, synthetic construct; identical to SEQ ID NO: 2350

SEQ ID NO: 2609 - protein, 107 aa, synthetic construct
DIQMTQSPSSLSASVGDRVTITCRASQGVRNDFGWFQQKPGKAPKRLIYEASSLQSGVPSRFSGSGSGTEFTLTISSLQPEDFATYYCLQQNSYPWTFGQGTKLEIK

SEQ ID NO: 2610 - protein, 115 aa, synthetic construct; identical to SEQ ID NO: 2350

SEQ ID NO: 2611 - protein, 107 aa, synthetic construct
DIQMTQSPSSLSASVGDRVTITCRASQGVRNDFGWFQQKPGKAPKRLIYKASSLQSGVPSRFSGSGSGTEFTLTISSLQPEDFATYYCLQQNSYPWTFGQGTKLEIK

SEQ ID NO: 2612 - protein, 115 aa, synthetic construct; identical to SEQ ID NO: 2350

SEQ ID NO: 2613 - protein, 107 aa, synthetic construct
DIQMTQSPSSLSASVGDRVTITCRASQGVRNDFGWFQQKPGKAPKRLIYLASSLQSGVPSRFSGSGSGTEFTLTISSLQPEDFATYYCLQQNSYPWTFGQGTKLEIK

SEQ ID NO: 2614 - protein, 115 aa, synthetic construct; identical to SEQ ID NO: 2350

SEQ ID NO: 2615 - protein, 107 aa, synthetic construct
DIQMTQSPSSLSASVGDRVTITCRASQGVRNDFGWFQQKPGKAPKRLIYSASSLQSGVPSRFSGSGSGTEFTLTISSLQPEDFATYYCLQQNSYPWTFGQGTKLEIK

SEQ ID NO: 2616 - protein, 115 aa, synthetic construct; identical to SEQ ID NO: 2350

SEQ ID NO: 2617 - protein, 107 aa, synthetic construct
DIQMTQSPSSLSASVGDRVTITCRASQGVRNDFGWFQQKPGKAPKRLIYGVSSLQSGVPSRFSGSGSGTEFTLTISSLQPEDFATYYCLQQNSYPWTFGQGTKLEIK

SEQ ID NO: 2618 - protein, 115 aa, synthetic construct; identical to SEQ ID NO: 2350

SEQ ID NO: 2619 - protein, 107 aa, synthetic construct
DIQMTQSPSSLSASVGDRVTITCRASQGVRNDFGWFQQKPGKAPKRLIYGESSLQSGVPSRFSGSGSGTEFTLTISSLQPEDFATYYCLQQNSYPWTFGQGTKLEIK

SEQ ID NO: 2620 - protein, 115 aa, synthetic construct; identical to SEQ ID NO: 2350

SEQ ID NO: 2621 - protein, 107 aa, synthetic construct
DIQMTQSPSSLSASVGDRVTITCRASQGVRNDFGWFQQKPGKAPKRLIYGPSSLQSGVPSRFSGSGSGTEFTLTISSLQPEDFATYYCLQQNSYPWTFGQGTKLEIK

SEQ ID NO: 2622 - protein, 115 aa, synthetic construct; identical to SEQ ID NO: 2350

SEQ ID NO: 2623 - protein, 107 aa, synthetic construct
DIQMTQSPSSLSASVGDRVTITCRASQGVRNDFGWFQQKPGKAPKRLIYGATSLQSGVPSRFSGSGSGTEFTLTISSLQPEDFATYYCLQQNSYPWTFGQGTKLEIK

SEQ ID NO: 2624 - protein, 115 aa, synthetic construct; identical to SEQ ID NO: 2350

SEQ ID NO: 2625 - protein, 107 aa, synthetic construct
DIQMTQSPSSLSASVGDRVTITCRASQGVRNDFGWFQQKPGKAPKRLIYGAPSLQSGVPSRFSGSGSGTEFTLTISSLQPEDFATYYCLQQNSYPWTFGQGTKLEIK

SEQ ID NO: 2626 - protein, 115 aa, synthetic construct; identical to SEQ ID NO: 2350

SEQ ID NO: 2627 - protein, 107 aa, synthetic construct
DIQMTQSPSSLSASVGDRVTITCRASQGVRNDFGWFQQKPGKAPKRLIYGASRLQSGVPSRFSGSGSGTEFTLTISSLQPEDFATYYCLQQNSYPWTFGQGTKLEIK

SEQ ID NO: 2628 - protein, 115 aa, synthetic construct; identical to SEQ ID NO: 2350

SEQ ID NO: 2629 - protein, 107 aa, synthetic construct
DIQMTQSPSSLSASVGDRVTITCRASQGVRNDFGWFQQKPGKAPKRLIYGASKLQSGVPSRFSGSGSGTEFTLTISSLQPEDFATYYCLQQNSYPWTFGQGTKLEIK

SEQ ID NO: 2630 - protein, 115 aa, synthetic construct; identical to SEQ ID NO: 2350

SEQ ID NO: 2631 - protein, 107 aa, synthetic construct
DIQMTQSPSSLSASVGDRVTITCRASQGVRNDFGWFQQKPGKAPKRLIYGASDLQSGVPSRFSGSGSGTEFTLTISSLQPEDFATYYCLQQNSYPWTFGQGTKLEIK

SEQ ID NO: 2632 - protein, 115 aa, synthetic construct; identical to SEQ ID NO: 2350

SEQ ID NO: 2633 - protein, 107 aa, synthetic construct
DIQMTQSPSSLSASVGDRVTITCRASQGVRNDFGWFQQKPGKAPKRLIYGASILQSGVPSRFSGSGSGTEFTLTISSLQPEDFATYYCLQQNSYPWTFGQGTKLEIK

SEQ ID NO: 2634 - protein, 115 aa, synthetic construct; identical to SEQ ID NO: 2350

SEQ ID NO: 2635 - protein, 107 aa, synthetic construct
DIQMTQSPSSLSASVGDRVTITCRASQGVRNDFGWFQQKPGKAPKRLIYGASLLQSGVPSRFSGSGSGTEFTLTISSLQPEDFATYYCLQQNSYPWTFGQGTKLEIK

SEQ ID NO: 2636 - protein, 115 aa, synthetic construct; identical to SEQ ID NO: 2350

SEQ ID NO: 2637 - protein, 107 aa, synthetic construct
DIQMTQSPSSLSASVGDRVTITCRASQGVRNDFGWFQQKPGKAPKRLIYGASSRQSGVPSRFSGSGSGTEFTLTISSLQPEDFATYYCLQQNSYPWTFGQGTKLEIK

SEQ ID NO: 2638 - protein, 115 aa, synthetic construct; identical to SEQ ID NO: 2350

SEQ ID NO: 2639 - protein, 107 aa, synthetic construct
DIQMTQSPSSLSASVGDRVTITCRASQGVRNDFGWFQQKPGKAPKRLIYGASSPQSGVPSRFSGSGSGTEFTLTISSLQPEDFATYYCLQQNSYPWTFGQGTKLEIK

SEQ ID NO: 2640 - protein, 115 aa, synthetic construct; identical to SEQ ID NO: 2350

SEQ ID NO: 2641 - protein, 107 aa, synthetic construct
DIQMTQSPSSLSASVGDRVTITCRASQGVRNDFGWFQQKPGKAPKRLIYGASSLPSGVPSRFSGSGSGTEFTLTISSLQPEDFATYYCLQQNSYPWTFGQGTKLEIK

SEQ ID NO: 2642 - protein, 115 aa, synthetic construct; identical to SEQ ID NO: 2350

SEQ ID NO: 2643 - protein, 107 aa, synthetic construct
DIQMTQSPSSLSASVGDRVTITCRASQGVRNDFGWFQQKPGKAPKRLIYGASSLASGVPSRFSGSGSGTEFTLTISSLQPEDFATYYCLQQNSYPWTFGQGTKLEIK

SEQ ID NO: 2644 - protein, 115 aa, synthetic construct; identical to SEQ ID NO: 2350

SEQ ID NO: 2645 - protein, 107 aa, synthetic construct
DIQMTQSPSSLSASVGDRVTITCRASQGVRNDFGWFQQKPGKAPKRLIYGASSLESGVPSRFSGSGSGTEFTLTISSLQPEDFATYYCLQQNSYPWTFGQGTKLEIK

SEQ ID NO: 2646 - protein, 115 aa, synthetic construct; identical to SEQ ID NO: 2350

SEQ ID NO: 2647 - protein, 107 aa, synthetic construct
DIQMTQSPSSLSASVGDRVTITCRASQGIRNDLGWYQQKPGKAPKRLIYAASSLQSGVPSRFSGSGSGTEFTLTISSLQPEDFATYYCLQHNSYPWTFGQGTKVEIK

SEQ ID NO: 2648 - protein, 115 aa, synthetic construct; identical to SEQ ID NO: 2350

SEQ ID NO: 2649 - protein, 107 aa, synthetic construct
EIVLTQSPATLSLSPGERATLSCRASQSVSSYLAWYQQKPGQAPRLLIYDASNRATGIPARFSGSGSGTDFTLTISSLEPEDFAVYYCQQRSNWPYTFGQGTKLEIK

SEQ ID NO: 2650 - protein, 115 aa, synthetic construct; identical to SEQ ID NO: 2350

SEQ ID NO: 2651 - protein, 107 aa, synthetic construct
DIQMTQSPSSLSASVGDRVTITCRASQSISSYLNWYQQKPGKAPKLLIYAASSLQSGVPSRFSGSGSGTDFTLTISSLQPEDFATYYCQQSYSTPFTFGPGTKVDIK

SEQ ID NO: 2652 - protein, 115 aa, synthetic construct
EVQLVESGGGVVQPGRSLRLSCAASGFTFSSYGMHWVRQAPGKGLEWVAVIWYDASNKEYAPSVKGRFTISRDNSKNTLYLQMNSLRAEDTAIYYCARPGEGDYWGQGTLVTVSS

SEQ ID NO: 2653 - protein, 107 aa, synthetic construct; identical to SEQ ID NO: 2301

SEQ ID NO: 2654 - protein, 115 aa, synthetic construct; identical to SEQ ID NO: 2652

SEQ ID NO: 2655 - protein, 107 aa, synthetic construct; identical to SEQ ID NO: 1999

SEQ ID NO: 2656 - protein, 115 aa, synthetic construct; identical to SEQ ID NO: 2350

SEQ ID NO: 2657 - protein, 107 aa, synthetic construct; identical to SEQ ID NO: 1999

SEQ ID NO: 2658 - protein, 15 aa, synthetic construct
GYLWGCEWNCGGITT

SEQ ID NO: 2659 - protein, 15 aa, synthetic construct
NAFRCWWDPPCQPMT

SEQ ID NO: 2660 - protein, 15 aa, synthetic construct
ARGLCWWDPPCTHDL

SEQ ID NO: 2661 - protein, 15 aa, synthetic construct
NHSLCYWDPPCEPST

SEQ ID NO: 2662 - protein, 15 aa, synthetic construct
MMYCGGNEVLCGPRV

SEQ ID NO: 2663 - protein, 15 aa, synthetic construct
GYRWGCEWNCGGITT

SEQ ID NO: 2664 - protein, 15 aa, synthetic construct
MMYCGGNEIFCEPRG

SEQ ID NO: 2665 - protein, 15 aa, synthetic construct
GYGWGCEWNCGGSSP

SEQ ID NO: 2666 - protein, 15 aa, synthetic construct
MMYCGGNEIFCGPRG

SEQ ID NO: 2667 - protein, 85 aa, Macaca fascicularis
NRMRCYNCGGSPSSSCKEAVTTCGEGRPQPGLEQIKLPGNPPVTLIHQHPACVAARHCNQVETESVGDVTYPAHRDCYLGDLCNS

SEQ ID NO: 2668 - protein, 5 aa, synthetic construct
GGGGS

SEQ ID NO: 2669 - protein, 11 aa, synthetic construct
  MOD_RES 1: note = ACETYLATION
  MOD_RES 3: note = disulfide bridge
  MOD_RES 9: note = disulfide bridge
  MOD_RES 11: note = polyethylene glycol with a mercaptoproprionate handle (PEG2-3-mercaptopropionate)
RDCYLGDLCNS

SEQ ID NO: 2670 - protein, 11 aa, synthetic construct
RDCYLGDLCNS

SEQ ID NO: 2671 - protein, 133 aa, synthetic construct
MKPQFVGILLSSLLGAALGNRMRCYNCGGSPSSSCKEAVTTCGEGRPQPGLEQIKLPGNPPVTLIHQHPACVAAHHCNQVETESVGDVTYPAHRDCYLGDLCNSAVASHVAPAGILAAAATALTCLLPGLWSG

1. An antibody or antigen binding fragment thereof that binds to human LY6G6D, wherein the antibody or antigen binding fragment comprises heavy chain CDRs H1, H2, and H3 and light chain CDRs L1, L2, and L3 amino acid sequences as recited for one of the Identifiers in Table 1.

2. The antibody or antigen binding fragment of claim 1, wherein the antigen or binding fragment comprises a heavy chain variable region and a light chain variable region comprising amino acid sequences as recited for one of the Identifiers in Table 2; or a heavy chain variable region and a light chain variable region having at least 90% sequence identity, at least 95% sequence identity, at least 97% sequence identity, at least 98% sequence identity, or at least 99% sequence identity with a heavy chain variable region and a light chain variable region comprising amino acid sequences as recited for one of the Identifiers in Table 2.

3. The antibody or antigen binding fragment of claim 1, wherein the antibody or fragment thereof is an scFv.

4. The antibody or antigen binding fragment of claim 1, wherein the antibody or antigen binding fragment is provided as an intact IgG antibody.

5. The antibody or antigen binding fragment of claim 4, wherein the IgG antibody comprises a wild-type or mutated IgG2 Fc region.

6. The antibody or antigen binding fragment of claim 4, wherein the IgG antibody comprises an IgG1 Fc region.

7. The antibody or antigen binding fragment of claim 4, wherein the IgG1 Fc region comprises one or mutations that reduce effector functions of the IgG antibody relative to a wild-type IgG1 Fc region.

8. The antibody or antigen binding fragment of claim 4, wherein the IgG antibody comprises an IgG4 Fc region.

9. The antibody or antigen binding fragment of claim 1, wherein the antibody or antigen binding fragment is human or is humanized.

10. The antibody or antigen binding fragment of claim 1 that comprises a glycosylation pattern characteristic of expression by a mammalian cell.

11. The antibody or antigen binding fragment of claim 9 that comprises a glycosylation pattern characteristic of expression by a CHO cell.

12. The antibody or antigen binding fragment of claim 1, wherein the antibody or antigen binding fragment is provided as a bispecific T cell engaging antibody (BiTE), a (SCFV)2, a NANOBODY®, a nanobody-HSA VHH-scAb, a VHH-Fab, a Dual scFab, a F(ab′)₂, a diabody, a CROSSMAB®, a DAF (two-in-one), a DAE (four-in-one), a DUTAMAB®, a DT-TgG, a knobs-in-holes common light chain, a knobs-in-holes assembly, a charge pair, a Fab-arm exchange, a SEEDbody, a LUZ-Y, a FcAb, a kl-body, an orthogonal Fab, a DVD-IgG, a IgG (H)-scFv, a scFv-(H) IgG, IgG (L)-scFv, scFv-(L) IgG, IgG (L,H)-Fv, IgG (H)-V, V(H)-IgG, IgG (L)-V, V(L)-IgG, KIH IgG-scFab, 2scFv-IgG, IgG-2scFv, scFv4-Ig, ZYBODY™, DVI-IgG, Diabody-C_{H}3, a triple body, a miniantibody, a minibody, a TriBi minibody, scFv-C_{H}3 KIH, Fab-scFv, a F(ab′)₂-scFv2, a scFv-KIH, a Fab-scFv-Fc, a tetravalent HCAb, a scDiabody-Fc, a Diabody-Fc, a tandem scFv-Fc, a VHH-Fc, a tandem VHH-Fc, a LTIH-Fc KiH, a Fab-VHH-Fc, an Intrabody, a dock and lock, an ImmTAC® (immune-mobilizing monoclonal TCRs (T cell receptors) against cancer), an IgG-IgG conjugate, a Cov-X-Body, a scFv1-PEG-scFv2, an Adnectin, a DARPin, or a fibronectin, an IgG, an IgM, an IgA, an IgE, an IgD, or a DEP conjugate, TMEAbody™, SAFEbody®, TRITAC®, a dual affinity retargeting (DART®) bispecific antibody, a simultaneous multiple interaction T-cell engagers (SMITE), or a SHIELD.

13. The antibody or antigen binding fragment of claim 1, wherein the antibody or antigen binding fragment thereof comprises an immunoglobulin binding motif that binds to an antigen selected from the group consisting CD16, γδ TCR, CTLA-4, PD-1, PD-L1, 4-1BB, IL-13, IL-4, VEGF, and CD3.

14. The antibody according to claim 1, wherein the antibody comprises heavy chain CDRs H1, H2, and H3 and light chain CDRs L1, L2, and L3 amino acid sequences as recited for an Identifier in Table 1 selected from the group consisting of CB21-498, CB21-498-001, CB21-498-002, CB21-498-003, CB21-498-004, CB21-498-005, CB21-498-006, CB21-498-007, CB21-498-008, CB21-498-009, CB21-498-010, CB21-498-011, CB21-498-012, CB21-498-013, CB21-498-014, CB21-498-015, CB21-498-016, CB21-498-017, CB21-498-018, CB21-498-019, CB21-498-020, CB21-498-021, CB21-498-022, CB21-498-023, CB21-498-024, CB21-498-025, CB21-498-026, CB21-498-027, CB21-498-028, CB21-498-029, CB21-498-030, CB21-498-031, CB21-498-032, CB21-498-033, CB21-498-034, CB21-498-035, CB21-498-036, CB21-498-037, CB21-498-038, CB21-498-039, CB21-498-040, CB21-498-041, CB21-498-042, CB21-498-043, CB21-498-044, CB21-498-045, CB21-498-046, CB21-498-047, CB21-498-048, CB21-498-049, CB21-498-050, CB21-498-051, CB21-498-052, CB21-498-053, CB21-498-054, CB21-498-055, CB21-498-056, CB21-498-057, CB21-498-058, CB21-498-059, CB21-498-060, CB21-498-061, CB21-498-062, CB21-498-063, CB21-498-064, CB21-498-065, CB21-498-066, CB21-498-067, CB21-498-068, CB21-498-069, CB21-498-070, CB21-498-071, CB21-498-072, CB21-498-073, CB21-498-074, CB21-498-075, CB21-498-076, CB21-498-077, CB21-498-078, CB21-498-079, CB21-498-080, CB21-498-081, CB21-498-082, CB21-498-083, CB21-498-084, CB21-498-085, CB21-498-086, CB21-498-087, CB21-498-088, CB21-498-089, CB21-498-090, CB21-498-091, CB21-498-092, CB21-498-093, CB21-498-094, CB21-498-095, CB21-498-096, CB21-498-097, CB21-498-098, CB21-498-099, CB21-498-100, CB21-498-101, CB21-498-102, CB21-498-103, CB21-498-104, CB21-498-105, CB21-498-106, CB21-498-107, CB21-498-108, CB21-498-109, CB21-498-110, CB21-498-111, CB21-498-112, CB21-498-113, CB21-498-114, CB21-498-115, CB21-498-116, CB21-498-117, CB21-498-118, CB21-498-119, CB21-498-120, CB21-498-121, CB21-498-122, CB21-498-123, CB21-498-124, CB21-498-125, CB21-498-126, CB21-498-127, CB21-498-128, CB21-498-129, CB21-498-130, CB21-498-131, CB21-498-132, CB21-498-133, CB21-498-134, CB21-498-135, CB21-498-136, CB21-498-137, CB21-498-138, CB21-498-139, CB21-498-140, CB21-498-141, CB21-498-142, CB21-498-143, CB21-499, CB21-499-001, CB21-499-002, CB21-499-003, CB21-499-004, CB21-499-005, CB21-499-006, CB21-499-007, CB21-499-008, CB21-499-009, CB21-499-010, CB21-499-011, CB21-499-012, CB21-499-013, CB21-499-014, CB21-499-015, CB21-499-016, CB21-499-017, CB21-499-018, CB21-499-019, CB21-499-020, CB21-499-021, CB21-499-022, CB21-499-023, CB21-499-024, CB21-499-025, CB21-499-026, CB21-499-027, CB21-499-028, CB21-499-029, CB21-499-030, CB21-499-031, CB21-499-032, CB21-499-033, CB21-499-034, CB21-499-035, CB21-499-036, CB21-499-037, CB21-499-038, CB21-499-039, CB21-499-040, CB21-499-041, CB21-499-042, CB21-499-043, CB21-499-044, CB21-499-045, CB21-499-046, CB21-499-047, CB21-499-048, CB21-499-049, CB21-499-050, CB21-499-051, CB21-499-052, CB21-499-053, CB21-499-054, CB21-499-055, CB21-499-056, CB21-499-057, CB21-499-058, CB21-499-059, CB21-499-060, CB21-499-061, CB21-499-062, CB21-499-063, CB21-499-064, CB21-499-065, CB21-499-066, CB21-499-067, CB21-499-068, CB21-499-069, CB21-499-070, CB21-499-071, CB21-499-072, CB21-499-073, CB21-499-074, CB21-499-075, CB21-499-076, CB21-499-077, CB21-499-078, CB21-499-079, CB21-499-080, CB21-499-081, CB21-499-082, CB21-499-083, CB21-499-084, CB21-499-085, CB21-499-086, CB21-499-087, CB21-499-088, CB21-499-089, CB21-499-090, CB21-499-091, CB21-499-092, CB21-499-093, CB21-499-094, CB21-499-095, CB21-499-096, CB21-499-097, CB21-499-098, CB21-499-099, CB21-499-100, CB21-499-101, CB21-499-102, CB21-499-103, CB21-499-104, CB21-499-105, CB21-499-106, CB21-499-107, CB21-499-108, CB21-499-109, CB21-499-110, CB21-499-111, CB21-499-112, CB21-499-113, CB21-499-114, CB21-499-115, CB21-499-116, CB21-499-117, CB21-499-118, CB21-499-119, CB21-499-120, CB21-499-121, CB21-499-122, CB21-499-123, CB21-499-124, CB21-499-125, CB21-499-126, CB21-499-127, CB21-499-128, CB21-499-129, CB21-499-130, CB21-499-131, CB21-499-132, CB21-499-133, CB21-499-134, CB21-499-135, CB21-499-136, CB21-499-137, CB21-499-138, CB21-499-139, CB21-499-140, CB21-499-141, CB21-499-142, CB21-499-143, CB21-499-144, CB21-499-145, CB21-499-146, CB21-499-147, CB21-499-148, CB21-499-149, CB21-499-150, CB21-499-151, CB21-499-152, CB21-499-153, CB21-499-154, CB21-499-155, CB21-499-156, CB21-499-157, CB21-499-158, CB21-499-159, CB21-499-160, CB21-499-161, CB21-499-162, CB21-499-163, CB21-499-164, CB21-499-165, CB21-499-166, CB21-499-167, CB21-499-168, CB21-499-169, CB21-499-170, CB21-499-171, CB21-499-172, CB21-499-174, CB21-499-175, CB21-499-176, CB21-499-177, CB21-499-178, and CB21-499-179.

15. The antibody according to claim 1, wherein the antigen or binding fragment comprises a heavy chain variable region and a light chain variable region comprising amino acid sequences as recited for an Identifier in Table 2 selected from the group consisting of CB21-498, CB21-498-001, CB21-498-002, CB21-498-003, CB21-498-004, CB21-498-005, CB21-498-006, CB21-498-007, CB21-498-008, CB21-498-009, CB21-498-010, CB21-498-011, CB21-498-012, CB21-498-013, CB21-498-014, CB21-498-015, CB21-498-016, CB21-498-017, CB21-498-018, CB21-498-019, CB21-498-020, CB21-498-021, CB21-498-022, CB21-498-023, CB21-498-024, CB21-498-025, CB21-498-026, CB21-498-027, CB21-498-028, CB21-498-029, CB21-498-030, CB21-498-031, CB21-498-032, CB21-498-033, CB21-498-034, CB21-498-035, CB21-498-036, CB21-498-037, CB21-498-038, CB21-498-039, CB21-498-040, CB21-498-041, CB21-498-042, CB21-498-043, CB21-498-044, CB21-498-045, CB21-498-046, CB21-498-047, CB21-498-048, CB21-498-049, CB21-498-050, CB21-498-051, CB21-498-052, CB21-498-053, CB21-498-054, CB21-498-055, CB21-498-056, CB21-498-057, CB21-498-058, CB21-498-059, CB21-498-060, CB21-498-061, CB21-498-062, CB21-498-063, CB21-498-064, CB21-498-065, CB21-498-066, CB21-498-067, CB21-498-068, CB21-498-069, CB21-498-070, CB21-498-071, CB21-498-072, CB21-498-073, CB21-498-074, CB21-498-075, CB21-498-076, CB21-498-077, CB21-498-078, CB21-498-079, CB21-498-080, CB21-498-081, CB21-498-082, CB21-498-083, CB21-498-084, CB21-498-085, CB21-498-086, CB21-498-087, CB21-498-088, CB21-498-089, CB21-498-090, CB21-498-091, CB21-498-092, CB21-498-093, CB21-498-094, CB21-498-095, CB21-498-096, CB21-498-097, CB21-498-098, CB21-498-099, CB21-498-100, CB21-498-101, CB21-498-102, CB21-498-103, CB21-498-104, CB21-498-105, CB21-498-106, CB21-498-107, CB21-498-108, CB21-498-109, CB21-498-110, CB21-498-111, CB21-498-112, CB21-498-113, CB21-498-114, CB21-498-115, CB21-498-116, CB21-498-117, CB21-498-118, CB21-498-119, CB21-498-120, CB21-498-121, CB21-498-122, CB21-498-123, CB21-498-124, CB21-498-125, CB21-498-126, CB21-498-127, CB21-498-128, CB21-498-129, CB21-498-130, CB21-498-131, CB21-498-132, CB21-498-133, CB21-498-134, CB21-498-135, CB21-498-136, CB21-498-137, CB21-498-138, CB21-498-139, CB21-498-140, CB21-498-141, CB21-498-142, CB21-498-143, CB21-499, CB21-499-001, CB21-499-002, CB21-499-003, CB21-499-004, CB21-499-005, CB21-499-006, CB21-499-007, CB21-499-008, CB21-499-009, CB21-499-010, CB21-499-011, CB21-499-012, CB21-499-013, CB21-499-014, CB21-499-015, CB21-499-016, CB21-499-017, CB21-499-018, CB21-499-019, CB21-499-020, CB21-499-021, CB21-499-022, CB21-499-023, CB21-499-024, CB21-499-025, CB21-499-026, CB21-499-027, CB21-499-028, CB21-499-029, CB21-499-030, CB21-499-031, CB21-499-032, CB21-499-033, CB21-499-034, CB21-499-035, CB21-499-036, CB21-499-037, CB21-499-038, CB21-499-039, CB21-499-040, CB21-499-041, CB21-499-042, CB21-499-043, CB21-499-044, CB21-499-045, CB21-499-046, CB21-499-047, CB21-499-048, CB21-499-049, CB21-499-050, CB21-499-051, CB21-499-052, CB21-499-053, CB21-499-054, CB21-499-055, CB21-499-056, CB21-499-057, CB21-499-058, CB21-499-059, CB21-499-060, CB21-499-061, CB21-499-062, CB21-499-063, CB21-499-064, CB21-499-065, CB21-499-066, CB21-499-067, CB21-499-068, CB21-499-069, CB21-499-070, CB21-499-071, CB21-499-072, CB21-499-073, CB21-499-074, CB21-499-075, CB21-499-076, CB21-499-077, CB21-499-078, CB21-499-079, CB21-499-080, CB21-499-081, CB21-499-082, CB21-499-083, CB21-499-084, CB21-499-085, CB21-499-086, CB21-499-087, CB21-499-088, CB21-499-089, CB21-499-090, CB21-499-091, CB21-499-092, CB21-499-093, CB21-499-094, CB21-499-095, CB21-499-096, CB21-499-097, CB21-499-098, CB21-499-099, CB21-499-100, CB21-499-101, CB21-499-102, CB21-499-103, CB21-499-104, CB21-499-105, CB21-499-106, CB21-499-107, CB21-499-108, CB21-499-109, CB21-499-110, CB21-499-111, CB21-499-112, CB21-499-113, CB21-499-114, CB21-499-115, CB21-499-116, CB21-499-117, CB21-499-118, CB21-499-119, CB21-499-120, CB21-499-121, CB21-499-122, CB21-499-123, CB21-499-124, CB21-499-125, CB21-499-126, CB21-499-127, CB21-499-128, CB21-499-129, CB21-499-130, CB21-499-131, CB21-499-132, CB21-499-133, CB21-499-134, CB21-499-135, CB21-499-136, CB21-499-137, CB21-499-138, CB21-499-139, CB21-499-140, CB21-499-141, CB21-499-142, CB21-499-143, CB21-499-144, CB21-499-145, CB21-499-146, CB21-499-147, CB21-499-148, CB21-499-149, CB21-499-150, CB21-499-151, CB21-499-152, CB21-499-153, CB21-499-154, CB21-499-155, CB21-499-156, CB21-499-157, CB21-499-158, CB21-499-159, CB21-499-160, CB21-499-161, CB21-499-162, CB21-499-163, CB21-499-164, CB21-499-165, CB21-499-166, CB21-499-167, CB21-499-168, CB21-499-169, CB21-499-170, CB21-499-171, CB21-499-172, CB21-499-174, CB21-499-175, CB21-499-176, CB21-499-177, CB21-499-178, and CB21-499-179.

16. The antibody according to claim 1, wherein the antigen or binding fragment comprises a heavy chain variable region and a light chain variable region comprising amino acid sequences as recited for an Identifier in Table 2 selected from the group consisting of CB21-499-177 and CB21-498-142.

17. An isolated nucleic acid encoding any one of the antibodies or antigen binding fragments of claim 1.

18. An expression vector comprising the isolated nucleic acid of claim 17.

19. A host cell comprising expression vector of claim 18.

20. The host cell of claim 19, which is a bacterial cell, a human cell, a mammalian cell, a Pichia cell, a plant cell, an HEK293 cell, or a CHO cell.

21. A composition comprising the antibody or antigen binding fragment of claim 1 and a pharmaceutically acceptable carrier or diluent.

22. The composition according to claim 21, further comprising one or more agents selected from the group consisting of anti-CD27 antibody, anti-CD47 antibody, anti-APRIL antibody, anti-PD-1 antibody, anti-PD-L1 antibody, anti-TIGIT antibody, anti-CTLA4 antibody, anti-CS1 antibody, anti-KIR2DL1/2/3 antibody, anti-CD137 antibody, anti-GITR antibody, anti-PD-L2 antibody, anti-ILT1 antibody, anti-ILT2 antibody, anti-ILT3 antibody, anti-ILT4 antibody, anti-ILT5 antibody, anti-ILT6 antibody, anti-ILT7 antibody, anti-ILT8 antibody, anti-CD40 antibody, anti-OX40 antibody, anti-ICOS, anti-KIR2DL1 antibody, anti-KIR2DL2/3 antibody, anti-KIR2DL4 antibody, anti-KIR2DL5A antibody, anti-KIR2DL5B antibody, anti-KIR3DL1 antibody, anti-KIR3DL2 antibody, anti-KIR3DL3 antibody, anti-NKG2A antibody, anti-NKG2C antibody, anti-NKG2E antibody, anti-4-1BB antibody, anti-TSLP antibody, anti-IL-10 antibody, IL-10 PEGylated IL-10, an agonist (e.g., an agonistic antibody or antigen-binding fragment thereof, or a soluble fusion) of a TNF receptor protein, an Immunoglobulin-like protein, a cytokine receptor, an integrin, a signaling lymphocytic activation molecules (SLAM proteins), an activating NK cell receptor, a Toll like receptor, OX40, CD2, CD7, CD27, CD28, CD30, CD40, ICAM-1, LFA-1 (CDl 1a/CD18), 4-1BB (CD137), B7-H3, ICOS (CD278), GITR, BAFFR, LIGHT, HVEM (LIGHTR), KIRDS2, SLAMF7, NKp80 (KLRF1), NKp44, NKp30, NKp46, CD19, CD4, CD8alpha, CD8beta, IL2R beta, IL2R gamma, IL7R alpha, ITGA4, VLA1, CD49a, ITGA4, IA4, CD49D, ITGA6, VLA-6, CD49f, ITGAD, CDl 1d, ITGAE, CD103, ITGAL, ITGAM, CDl 1b, ITGAX, CDl 1c, ITGB1, CD29, ITGB2, CD18, ITGB7, NKG2D, NKG2C, TNFR2, TRANCE/RANKL, DNAM1 (CD226), SLAMF4 (CD244, 2B4), CD84, CD96 (Tactile), CEACAM1, CRTAM, Ly9 (CD229), CD160 (BY55), PSGL1, CD100 (SEMA4D), CD69, SLAMF6 (NTB-A, Ly108), SLAM (SLAMF1, CD150, IPO-3), SLAM7, BLAME (SLAMF8), SELPLG (CD162), LTBR, LAT, GADS, PAG/Cbp, CD19a, a ligand that specifically binds with CD83, an inhibitor of CD47, an inhibitor of PD-1, an inhibitor of PD-L1, an inhibitor of PD-L2, an inhibitor of CTLA4, an inhibitor of TIM3, an inhibitor of LAG3, an inhibitor of CEACAM (e.g., CEACAM-1, -3 and/or -5), an inhibitor of VISTA, an inhibitor of BTLA, an inhibitor of TIGIT, an inhibitor of LAIR1, an inhibitor of IDO, an inhibitor of TDO, an inhibitor of CD160, an inhibitor of TGFR beta, and a cyclic dinculeotide or other STING pathway agonist.

23. A method of producing an antibody or antigen binding fragment comprising:
culturing a host cell comprising one or more polynucleotides encoding any one of the antibodies or antigen binding fragments of claim 1 under conditions favorable to expression of the polynucleotide; and optionally, recovering the antibody or antigen binding fragment from the host cell and/or culture medium.

24. An antibody or antigen binding fragment according to claim 1, for the treatment of cancer.

25. A method of treating cancer in a human subject, comprising administering to the subject an effective amount of an antibody or antigen binding fragment of claim 1, optionally in association with a further therapeutic agent or therapeutic procedure.
